(19) United States
(12) Patent Application Publication
(10) Pub. No.: US 2009/0191217 A1
(43) Pub. Date: Jul. 30, 2009

(54) Anti-IL-1R1 Single Domain Antibodies And Therapeutic Uses

(76) Inventors: Ruud M. de Wildt, Cambridge (GB); Philip D. Drew, Cambridge (GB); Ian M. Tomlinson, Great Shelford (GB); Mary Fitzgerald, Essex (GB); Craig Fox, Essex (GB); Steve Holmes, Great Chishill (GB)

Correspondence Address: MCDERMOTT WILL & EMERY LLP, 28 STATE STREET, BOSTON, MA, 02109-1775, US

(21) Appl. No.: 11/791,781

(22) PCT Filed: Dec. 1, 2005
(86) PCT No.: PCT/GB2005/004601

§ 371 Date: Aug. 23, 2007

Related U.S. Application Data
(60) Provisional application No. 60/632,361, filed on Dec. 2, 2004.

(30) Foreign Application Priority Data
Oct. 24, 2005 (GB) 0521621.3

(51) Int. Cl. A61K 39/395; A61M 5/178; A61K 9/48; A61K 9/20; A61M 37/00; A61M 25/00; A61M 15/00

(52) U.S. Cl. 424/158.1; 604/187; 424/451; 424/464; 604/289; 604/523; 128/200.23

(57) ABSTRACT

Disclosed is the use of an antagonist of Interleukin 1 receptor type 1 (IL-1R1) for the manufacture of a medicament treating, preventing or suppressing lung inflammation or a respiratory disease. In some embodiments of the described invention, the medicament is for local administration to pulmonary tissue. Also disclosed are methods for treating lung inflammation or a respiratory disease.

### RELATED APPLICATIONS

[0001] This application is a continuation-in-part of International Application No. PCT/GB2005/002163, which designated the United States and was filed on May 31, 2005, which claims the benefit of U.S. Provisional Application No. 60/632,361, filed on Dec. 2, 2004; and this application claims priority under 35 U.S.C. § 119 or 365 to United Kingdom, Application No. 0521621.3, filed Oct. 24, 2005. The entire teachings of the above applications are incorporated herein by reference.

### BACKGROUND OF THE INVENTION

[0002] The in vivo use of many agents with therapeutic or diagnostic potential is not possible. Larger agents that have in vivo serum half-lives that are sufficiently long to allow for therapeutic or diagnostic efficacy often are unable to penetrate tissues or organs to produces a desired therapeutic or diagnostic effect at a desired location. Smaller agents are able to enter tissues and organs, but frequently have short in vivo serum half-lives, and are rapidly cleared from the systemic circulation. For example, the in vivo serum half-life of dAb monomers is about 30 minutes. (See, Examples 9 and 13 of WO 2004/081026 A2.) Similarly, the in vivo serum half-life of antigen-binding fragments of antibodies, particularly Fv fragments, is also short and makes them unsuitable for many in vivo therapeutic and diagnostic applications. (Peters et al., Science 286(5439):434 (1999).) Further, altering or modifying such agents to increase the in vivo serum half-life can reduce the activity of the agent.

[0003] Certain agents that bind Interleukin 1 Receptor Type 1 (IL-1R1) and neutralize its activity have proven to be effective therapeutic agents for certain inflammatory conditions, such as moderately to severely active rheumatoid arthritis. However, other agents that bind IL-1R1, such as the anti-IL-1R1 antibody AMG 108 (Amgen) have failed to meet primary endpoints in clinical studies. No agents that bind and antagonize IL-1R1 have been demonstrated to be effective in treating lung inflammation or respiratory diseases, such as chronic obstructive pulmonary disease (COPD).

[0004] A need exists for improved agents that antagonize IL-1R1 and method for administering such agents to treat lung inflammation and lung disease.

### SUMMARY OF THE INVENTION

[0005] The invention relates to use of an antagonist of Interleukin-1 Receptor Type 1 (IL-1R1) for the manufacture of a medicament for treating a respiratory disease, and to method of treating a respiratory disease that comprise administering an antagonists of IL-1R1. The respiratory disease can be, for example, selected from the group consisting of lung inflammation, chronic obstructive pulmonary disease, asthma, pneumonia, hypersensitivity pneumonitis, pulmonary infiltrate with eosinophilia, environmental lung disease, pneumonia, bronchiectasis, cystic fibrosis, interstitial lung disease, primary pulmonary hypertension, pulmonary thromboembolism, disorders of the pleura, disorders of the mediastinum, disorders of the diaphragm, hypoventilation, hyperventilation, sleep apnea, acute respiratory distress syndrome, mesothelioma, sarcoma, graft rejection, graft versus host disease, lung cancer, allergic rhinitis, allergy, asbestosis, aspergilloma, aspergillosis, bronchiectasis, chronic bronchitis, emphysema, eosinophilic pneumonia, idiopathic pulmonary fibrosis, invasive pneumococcal disease, influenza, nontuberculous mycobacteria, pleural effusion, pneumoconiosis, pneumocytosis, pneumonia, pulmonary actinomycosis, pulmonary alveolar proteinosis, pulmonary anthrax, pulmonary edema, pulmonary embolus, pulmonary inflammation, pulmonary histiocytosis X, pulmonary hypertension, pulmonary nocardiosis, pulmonary tuberculosis, pulmonary veno-occlusive disease, rheumatoid lung disease, sarcoidosis, and Wegener's granulomatosis.

[0006] The medicament can be for systemic or local administration. In some embodiments, the medicament is for intraperoneal or subcutaneous administration. In other embodiments, the medicament is for local administration to pulmonary tissue, for example, the medicament can be for inhalation or intranasal administration.

[0007] In some embodiments the medicament further comprises antagonist of Tumor Necrosis Factor Receptor 1 (TNFR1, p55), or is for administration together with an antagonist of Tumor Necrosis Factor Receptor 1 (TNFR1, p55).

[0008] In one aspect, the method relates to use of an antagonist of IL-1R1 for manufacture of a medicament for treating a respiratory. In some embodiments, the antagonist of IL-1R1 comprises a polypeptide domain that has binding specificity for Interleukin-1 Receptor Type 1 (IL-1R1) and inhibits binding of a ligand selected from the group consisting of Interleukin-1α (IL-1α) and Interleukin-1β (IL-1β) to IL-1R1. For example, the polypeptide domain that has binding specificity for IL-1R1 can be selected from the group consisting of an antibody or antigen-binding fragment thereof, Interleukin-1 receptor antagonist (IL-1ra) or a functional variant of IL-1ra.

[0009] Preferably, the polypeptide domain that has binding specificity for IL-1R1 inhibits binding of said ligand to IL-1R1 with an IC50 that is ≦1 μM. In some embodiments, the polypeptide domain that has binding specificity for IL-1R1 inhibits IL-1α- or IL-1β-induced release of Interleukin-8 by MRC-5 cells (ATCC Accession No. CCL-171) in an in vitro assay with a ND50 that is ≦1 μM, or preferably ≦1 nM. In other embodiments, the polypeptide domain that has binding specificity for IL-1R1 inhibits IL-1α- or IL-1β-induced release of Interleukin-6 in a whole blood assay with a ND50 that is ≦1 μM.

[0010] In particular embodiments, the polypeptide domain that has binding specificity for IL-1R1 is an antigen-binding fragment of an antibody, and said antigen-binding fragment is an immunoglobulin single variable domain. Preferably, one or more of the framework regions (FR) in said immunoglobulin single variable domain comprise (a) the amino acid sequence of a human framework region, (b) at least 8 contiguous amino acids of the amino acid sequence of a human framework region, or (c) an amino acid sequence encoded by a human germline antibody gene segment, wherein said framework regions are as defined by Kabat. The amino acid sequences of one or more framework regions in said immunoglobulin single variable domain can be the same as the amino acid sequence of a corresponding framework region encoded by a human germline antibody gene segment, or the amino acid sequences of one or more of said framework regions can collectively comprise up to 5 amino acid differences relative to the corresponding framework regions encoded by a human germline antibody gene segment. In some embodiments, the amino acid sequences of FR1, FR2, FR3 and FR4 in the immunoglobulin single variable domain are the same as the amino acid sequences of corresponding framework regions encoded by a human germline antibody gene segment, or the amino acid sequences of FR1, FR2, FR3 and FR4 collectively contain up to 10 amino acid differences relative to the corresponding framework regions encoded by a human germline antibody gene segment. In particular embodiments, the immunoglobulin single variable domain comprises FR1, FR2 and FR3 regions, and the amino acid sequence of said FR1, FR2 and FR3 are the same as the amino acid sequences of corresponding framework regions encoded by a human germline antibody gene segment. In more particular embodiments, the human germline antibody gene segment comprises is DPK9 and JK1.

[0011] The antagonist of IL-1R1 can comprise an immunoglobulin single variable domain that competes for binding to IL-1R1 with a dAb selected from the group consisting of DOM4-122-23 (SEQ ID NO:1), DOM4-122-24 (SEQ ID NO:2), DOM4-130-30 (SEQ ID NO:3), DOM4-130-46 (SEQ ID NO:4), DOM4-130-51 (SEQ ID NO:5), DOM4-130-53 (SEQ ID NO:6), DOM4-130-54 (SEQ ID NO:7), DOM4-1 (SEQ ID NO:8), DOM4-2 (SEQ ID NO:9), DOM4-3 (SEQ ID NO:10), DOM4-4 (SEQ ID NO:11), DOM4-5 (SEQ ID NO:12), DOM4-6 (SEQ ID NO:13), DOM4-7 (SEQ ID NO:14), DOM4-8 (SEQ ID NO:15), DOM4-9 (SEQ ID NO:16), DOM4-10 (SEQ ID NO:17), DOM4-11 (SEQ ID NO:18), DOM4-12 (SEQ ID NO:19), DOM4-13 (SEQ ID NO:20), DOM4-14 (SEQ ID NO:21), DOM4-15 (SEQ ID NO:22), DOM4-20 (SEQ ID NO:23), DOM4-21 (SEQ ID NO:24), DOM4-22 (SEQ ID NO:25), DOM4-23 (SEQ ID NO:26), DOM4-25 (SEQ ID NO:27), DOM4-26 (SEQ ID NO:28), DOM4-27 (SEQ ID NO:29), DOM4-28 (SEQ ID NO:30), DOM4-29 (SEQ ID NO:31), DOM4-31 (SEQ ID NO:32), DOM4-32 (SEQ ID NO:33), DOM4-33 (SEQ ID NO:34), DOM4-34 (SEQ ID NO:35), DOM4-36 (SEQ ID NO:36), DOM4-37 (SEQ ID NO:37), DOM4-38 (SEQ ID NO:38), DOM4-39 (SEQ ID NO:39), DOM4-40 (SEQ ID NO:40), DOM4-41 (SEQ ID NO:41), DOM4-42 (SEQ ID NO:42), DOM4-44 (SEQ ID NO:43), DOM4-45 (SEQ ID NO:44), DOM4-46 (SEQ ID NO:45), DOM4-49 (SEQ ID NO:46), DOM4-50 (SEQ ID NO:47), DOM4-74 (SEQ ID NO:48), DOM4-75 (SEQ ID NO:49), DOM4-76 (SEQ ID NO:50), DOM4-78 (SEQ ID NO:51), DOM4-79 (SEQ ID NO:52), DOM4-80 (SEQ ID NO:53), DOM4-81 (SEQ ID NO:54), DOM4-82 (SEQ ID NO:55), DOM4-83 (SEQ ID NO:56), DOM4-84 (SEQ ID NO:57), DOM4-85 (SEQ ID NO:58), DOM4-86 (SEQ ID NO:59), DOM4-87 (SEQ ID NO:60), DOM4-88 (SEQ ID NO:61), DOM4-89 (SEQ ID NO:62), DOM4-90 (SEQ ID NO:63), DOM4-91 (SEQ ID NO:64), DOM4-92 (SEQ ID NO:65), DOM4-93 (SEQ ID NO:66), DOM4-94 (SEQ ID NO:67), DOM4-95 (SEQ ID NO:68), DOM4-96 (SEQ ID NO:69), DOM4-97 (SEQ ID NO:70), DOM4-98 (SEQ ID NO:71), DOM4-99 (SEQ ID NO:72), DOM4-100 (SEQ ID NO:73), DOM4-101 (SEQ ID NO:74), DOM4-102 (SEQ ID NO:75), DOM4-103 (SEQ ID NO:76), DOM4-104 (SEQ ID NO:77), DOM4-105 (SEQ ID NO:78), DOM4-106 (SEQ ID NO:79), DOM4-107 (SEQ ID NO:80), DOM4-108 (SEQ ID NO:81), DOM4-109 (SEQ ID NO:82), DOM4-110 (SEQ ID NO:83), DOM4-111 (SEQ ID NO:84), DOM4-112 (SEQ ID NO:85), DOM4-113 (SEQ ID NO:86), DOM4-114 (SEQ ID NO:87), DOM4-115 (SEQ ID NO:88), DOM4-116 (SEQ ID NO:89), DOM4-117 (SEQ ID NO:90), DOM4-118 (SEQ ID NO:91), DOM4-119 (SEQ ID NO:92), DOM4-120 (SEQ ID NO:93), DOM4-121 (SEQ ID NO:94), DOM4-122 (SEQ ID NO:95), DOM4-122-1 (SEQ ID NO:96), DOM4-122-2 (SEQ ID NO:97), DOM4-122-3 (SEQ ID NO:98), DOM4-122-4 (SEQ ID NO:99), DOM4-122-5 (SEQ ID NO:100), DOM4-122-6 (SEQ ID NO:101), DOM4-122-7 (SEQ ID NO:102), DOM4-122-8 (SEQ ID NO:103), DOM4-122-9 (SEQ ID NO:104), DOM4-122-10 (SEQ ID NO:105), DOM4-122-11 (SEQ ID NO:106), DOM4-122-12 (SEQ ID NO:107), DOM4-122-13 (SEQ ID NO:108), DOM4-122-14 (SEQ ID NO:109), DOM4-122-15 (SEQ ID NO:110), DOM4-122-16 (SEQ ID NO:111), DOM4-122-17 (SEQ ID NO:112), DOM4-122-18 (SEQ ID NO:113), DOM4-122-19 (SEQ ID NO:114), DOM4-122-20 (SEQ ID NO:115), DOM4-122-21 (SEQ ID NO:116), DOM4-122-22 (SEQ ID NO:117), DOM4-122-25 (SEQ ID NO:118), DOM4-122-26 (SEQ ID NO:119), DOM4-122-27 (SEQ ID NO:120), DOM4-122-28 (SEQ ID NO:121), DOM4-122-29 (SEQ ID NO:122), DOM4-122-30 (SEQ ID NO:123), DOM4-122-31 (SEQ ID NO:124), DOM4-122-32 (SEQ ID NO:125), DOM4-122-33 (SEQ ID NO:126), DOM4-122-34 (SEQ ID NO:127), DOM4-122-35 (SEQ ID NO:128), DOM4-122-36 (SEQ ID NO: 129), DOM4-122-37 (SEQ ID NO:130), DOM4-122-38 (SEQ ID NO:131), DOM4-122-39 (SEQ ID NO:132), DOM4-122-40 (SEQ ID NO:133), DOM4-122-41 (SEQ ID NO:134), DOM4-122-42 (SEQ ID NO:135), DOM4-122-43 (SEQ ID NO:136), DOM4-122-44 (SEQ ID NO:137), DOM4-122-45 (SEQ ID NO:138), DOM4-122-46 (SEQ ID NO:139), DOM4-122-47 (SEQ ID NO:140), DOM4-122-48 (SEQ ID NO:141), DOM4-122-49 (SEQ ID NO:142), DOM4-122-50 (SEQ ID NO:143), DOM4-122-51 (SEQ ID NO:144), DOM4-122-52 (SEQ ID NO:145), DOM4-122-54 (SEQ ID NO:146), DOM4-122-55 (SEQ ID NO:147), DOM4-122-56 (SEQ ID NO:148), DOM4-122-57 (SEQ ID NO:149), DOM4-122-58 (SEQ ID NO:150), DOM4-122-59 (SEQ ID NO:151), DOM4-122-60 (SEQ ID NO:152), DOM4-122-61 (SEQ ID NO:153), DOM4-122-62 (SEQ ID NO:154), DOM4-122-63 (SEQ ID NO:155), DOM4-122-64 (SEQ ID NO:156), DOM4-122-65 (SEQ ID NO:157), DOM4-122-66 (SEQ ID NO:158), DOM4-122-67 (SEQ ID NO:159), DOM4-122-68 (SEQ ID NO:160), DOM4-122-69 (SEQ ID NO:161), DOM4-122-70 (SEQ ID NO:162), DOM4-122-71 (SEQ ID NO:163), DOM4-122-72 (SEQ ID NO:164), DOM4-122-73 (SEQ ID NO:165), DOM4-123 (SEQ ID NO:166), DOM4-124 (SEQ ID NO:167) DOM4-125 (SEQ ID NO:168), DOM4-126 (SEQ ID NO:169), DOM4-127 (SEQ ID NO:170), DOM4-128 (SEQ ID NO:171), DOM4-129 (SEQ ID NO:172), DOM4-129-1 (SEQ ID NO:173), DOM4-129-2 (SEQ ID NO:174), DOM4-129-3 (SEQ ID NO:175), DOM4-129-4 (SEQ ID NO:176), DOM4-129-5 (SEQ ID NO:177), DOM4-129-6 (SEQ ID NO:178), DOM4-129-7 (SEQ ID NO:179), DOM4-129-8 (SEQ ID NO:180), DOM4-129-9 (SEQ ID NO:181), DOM4-129-10 (SEQ ID NO:182), DOM4-129-11 (SEQ ID NO:183), DOM4-129-12 (SEQ ID NO:184), DOM4-129-13 (SEQ ID NO:185), DOM4-129-14 (SEQ ID NO:186), DOM4-129-15 (SEQ ID NO:187), DOM4-129-16 (SEQ ID NO:188), DOM4-129-17 (SEQ ID NO:189), DOM4-129-18 (SEQ ID NO:190), DOM4-129-19 (SEQ ID NO:191), DOM4-129-20 (SEQ ID NO:192), DOM4-129-21 (SEQ ID NO:193), DOM4-129-22 (SEQ ID NO:194), DOM4-129-23 (SEQ ID NO:195), DOM4-129-24 (SEQ ID NO:196), DOM4-129-25 (SEQ ID NO:197), DOM4-129-26 (SEQ ID NO:198), DOM4-129-27 (SEQ ID NO:199), DOM4-129-28 (SEQ ID NO:200), DOM4-129-29 (SEQ ID NO:201), DOM4-129-31 (SEQ ID NO:202), DOM4-129-32 (SEQ ID NO:203), DOM4-129-33 (SEQ ID NO:204), DOM4-129-34 (SEQ ID NO:205), DOM4-129-35 (SEQ ID NO:206), DOM4-129-37 (SEQ ID NO:207), DOM4-129-38 (SEQ ID NO:208), DOM4-129-39 (SEQ ID NO:209), DOM4-129-40 (SEQ ID NO:210), DOM4-129-41 (SEQ ID NO:211), DOM4-129-42 (SEQ ID NO:212), DOM4-129-43 (SEQ ID NO:213), DOM4-129-44 (SEQ ID NO:214), DOM4-130 (SEQ ID NO:215), DOM4-130-1 (SEQ ID NO:216), DOM4-130-2 (SEQ ID NO:217), DOM4-130-3 (SEQ ID NO:218), DOM4-130-4 (SEQ ID NO:219), DOM4-130-5 (SEQ ID NO:220), DOM4-130-6 (SEQ ID NO:221), DOM4-130-7 (SEQ ID NO:222), DOM4-130-8 (SEQ ID NO:223), DOM4-130-9 (SEQ ID NO:224), DOM4-130-10 (SEQ ID NO:225), DOM4-130-11 (SEQ ID NO:226), DOM4-130-12 (SEQ ID NO:227), DOM4-130-13 (SEQ ID NO:228), DOM4-130-14 (SEQ ID NO:229), DOM4-130-15 (SEQ ID NO:230), DOM4-130-16 (SEQ ID NO:231), DOM4-130-17 (SEQ ID NO:232), DOM4-130-18 (SEQ ID NO:233), DOM4-130-19 (SEQ ID NO:234), DOM4-130-20 (SEQ ID NO:235), DOM4-130-21 (SEQ ID NO:236), DOM4-130-22 (SEQ ID NO:237), DOM4-130-23 (SEQ ID NO:238), DOM4-130-24 (SEQ ID NO:239), DOM4-130-25 (SEQ ID NO:240), DOM4-130-26 (SEQ ID NO:241), DOM4-130-27 (SEQ ID NO:242), DOM4-130-28 (SEQ ID NO:243), DOM4-130-31 (SEQ ID NO:244), DOM4-130-32 (SEQ ID NO:245), DOM4-130-33 (SEQ ID NO:246), DOM4-130-34 (SEQ ID NO:247), DOM4-130-35 (SEQ ID NO:248), DOM4-130-36 (SEQ ID NO:249), DOM4-130-37 (SEQ ID NO:250), DOM4-130-38 (SEQ ID NO:251), DOM4-130-39 (SEQ ID NO:252), DOM4-130-40 (SEQ ID NO:253), DOM4-130-41 (SEQ ID NO:254), DOM4-130-42 (SEQ ID NO:255), DOM4-130-43 (SEQ ID NO:256), DOM4-130-44 (SEQ ID NO:257), DOM4-130-45 (SEQ ID NO:258), DOM4-130-46 (SEQ ID NO:259), DOM4-130-47 (SEQ ID NO:260), DOM4-130-48 (SEQ ID NO:261), DOM4-130-49 (SEQ ID NO:262), DOM4-130-50 (SEQ ID NO:263), DOM4-130-51 (SEQ ID NO:264), DOM4-130-52 (SEQ ID NO:265), DOM4-130-53 (SEQ ID NO:266), DOM4-130-54 (SEQ ID NO:267), DOM4-130-55 (SEQ ID NO:268), DOM4-130-56 (SEQ ID NO:269), DOM4-130-57 (SEQ ID NO:270), DOM4-130-58 (SEQ ID NO:271), DOM4-130-59 (SEQ ID NO:272), DOM4-130-60 (SEQ ID NO:273), DOM4-130-61 (SEQ ID NO:274), DOM4-130-62 (SEQ ID NO:275), DOM4-130-63 (SEQ ID NO:276), DOM4-130-64 (SEQ ID NO:277), DOM4-130-65 (SEQ ID NO:278), DOM4-130-66 (SEQ ID NO:279), DOM4-130-67 (SEQ ID NO:280), DOM4-130-68 (SEQ ID NO:281), DOM4-130-69 (SEQ ID NO:282), DOM4-130-70 (SEQ ID NO:283), DOM4-130-71 (SEQ ID NO:284), DOM4-130-72 (SEQ ID NO:285), DOM4-130-73 (SEQ ID NO:286), DOM4-130-74 (SEQ ID NO:287), DOM4-130-75 (SEQ ID NO:288), DOM4-130-76 (SEQ ID NO:289), DOM4-130-77 (SEQ ID NO:290), DOM4-130-78 (SEQ ID NO:291), DOM4-130-79 (SEQ ID NO:292), DOM4-130-80 (SEQ ID NO:293), DOM4-130-81 (SEQ ID NO:294), DOM4-130-82 (SEQ ID NO:295), DOM4-130-83 (SEQ ID NO:296), DOM4-130-84 (SEQ ID NO:297), DOM4-130-85 (SEQ ID NO:298), DOM4-130-86 (SEQ ID NO:299), DOM4-130-87 (SEQ ID NO:300), DOM4-130-88 (SEQ ID NO:301), DOM4-130-89 (SEQ ID NO:302), DOM4-130-90 (SEQ ID NO:303), DOM4-130-91 (SEQ ID NO:304), DOM4-130-92 (SEQ ID NO:305), DOM4-130-93 (SEQ ID NO:306), DOM4-130-94 (SEQ ID NO:307), DOM4-130-95 (SEQ ID NO:308), DOM4-130-96 (SEQ ID NO:309), DOM4-130-97 (SEQ ID NO:310), DOM4-130-98 (SEQ ID NO:311), DOM4-130-99 (SEQ ID NO:312), DOM4-130-100 (SEQ ID NO:313), DOM4-130-101 (SEQ ID NO:314), DOM4-130-102 (SEQ ID NO:315), DOM4-130-103 (SEQ ID NO:316), DOM4-130-104 (SEQ ID NO:317), DOM4-130-105 (SEQ ID NO:318), DOM4-130-106 (SEQ ID NO:319), DOM4-130-107 (SEQ ID NO:320), DOM4-130-108 (SEQ ID NO:321), DOM4-130-109 (SEQ ID NO:322), DOM4-130-110 (SEQ ID NO:323), DOM4-130-111 (SEQ ID NO:324), DOM4-130-112 (SEQ ID NO:325), DOM4-130-113 (SEQ ID NO:326), DOM4-130-114 (SEQ ID NO:327), DOM4-130-115 (SEQ ID NO:328), DOM4-130-116 (SEQ ID NO:329), DOM4-130-117 (SEQ ID NO:330), DOM4-130-118 (SEQ ID NO:331), DOM4-130-119 (SEQ ID NO:332), DOM4-130-120 (SEQ ID NO:333), DOM4-130-121 (SEQ ID NO:334), DOM4-130-122 (SEQ ID NO:335), DOM4-130-123 (SEQ ID NO:336), DOM4-130-124 (SEQ ID NO:337), DOM4-130-125 (SEQ ID NO:338), DOM4-130-126 (SEQ ID NO:339), DOM4-130-127 (SEQ ID NO:340), DOM4-130-128 (SEQ ID NO:341), DOM4-130-129 (SEQ ID NO:342), DOM4-130-130 (SEQ ID NO:343), DOM4-130-131 (SEQ ID NO:344), DOM4-130-132 (SEQ ID NO:345), DOM4-130-133 (SEQ ID NO:346), DOM4-131 (SEQ ID NO:347), DOM4-132 (SEQ ID NO:348), and DOM4-133 (SEQ ID NO:349).

[0012] In particular embodiments, the antagonist of IL-1R1 comprises an immunoglobulin single variable domain immunoglobulin single variable domain comprises an amino acid sequence that has at least about 90% amino acid sequence identity with an amino acid sequence selected from the group consisting of DOM4-122-23 (SEQ ID NO:1), DOM4-122-24 (SEQ ID NO:2), DOM4-130-30 (SEQ ID NO:3), DOM4-130-46 (SEQ ID NO:4), DOM4-130-51 (SEQ ID NO:5), DOM4-130-53 (SEQ ID NO:6), DOM4-130-54 (SEQ ID NO:7), DOM4-1 (SEQ ID NO:8), DOM4-2 (SEQ ID NO:9), DOM4-3 (SEQ ID NO:10), DOM4-4 (SEQ ID NO:11), DOM4-5 (SEQ ID NO:12), DOM4-6 (SEQ ID NO:13), DOM4-7 (SEQ ID NO:14), DOM4-8 (SEQ ID NO:15), DOM4-9 (SEQ ID NO:16), DOM4-10 (SEQ ID NO:17), DOM4-11 (SEQ ID NO:18), DOM4-12 (SEQ ID NO:19), DOM4-13 (SEQ ID NO:20), DOM4-14 (SEQ ID NO:21), DOM4-15 (SEQ ID NO:22), DOM4-20 (SEQ ID NO:23), DOM4-21 (SEQ ID NO:24), DOM4-22 (SEQ ID NO:25), DOM4-23 (SEQ ID NO:26), DOM4-25 (SEQ ID NO:27), DOM4-26 (SEQ ID NO:28), DOM4-27 (SEQ ID NO:29), DOM4-28 (SEQ ID NO:30), DOM4-29 (SEQ ID NO:31), DOM4-31 (SEQ ID NO:32), DOM4-32 (SEQ ID NO:33), DOM4-33 (SEQ ID NO:34), DOM4-34 (SEQ ID NO:35), DOM4-36 (SEQ ID NO:36), DOM4-37 (SEQ ID NO:37), DOM4-38 (SEQ ID NO:38), DOM4-39 (SEQ ID NO:39), DOM4-40 (SEQ ID NO:40), DOM4-41 (SEQ ID NO:41), DOM4-42 (SEQ ID NO:42), DOM4-44 (SEQ ID NO:43), DOM4-45 (SEQ ID NO:44), DOM4-46 (SEQ ID NO:45), DOM4-49 (SEQ ID NO:46), DOM4-50 (SEQ ID NO:47), DOM4-74 (SEQ ID NO:48), DOM4-75 (SEQ ID NO:49), DOM4-76 (SEQ ID NO:50), DOM4-78 (SEQ ID NO:51), DOM4-79 (SEQ ID NO:52), DOM4-80 (SEQ ID NO:53), DOM4-81 (SEQ ID NO:54), DOM4-82 (SEQ ID NO:55), DOM4-83 (SEQ ID NO:56), DOM4-84 (SEQ ID NO:57), DOM4-85 (SEQ ID NO:58), DOM4-86 (SEQ ID NO:59), DOM4-87 (SEQ ID NO:60), DOM4-88 (SEQ ID NO:61), DOM4-89 (SEQ ID NO:62), DOM4-90 (SEQ ID NO:63), DOM4-91 (SEQ ID NO:64), DOM4-92 (SEQ ID NO:65), DOM4-93 (SEQ ID NO:66), DOM4-94 (SEQ ID NO:67), DOM4-95 (SEQ ID NO:68), DOM4-96 (SEQ ID NO:69), DOM4-97 (SEQ ID NO:70), DOM4-98 (SEQ ID NO:71), DOM4-99 (SEQ ID NO:72), DOM4-100 (SEQ ID NO:73), DOM4-101 (SEQ ID NO:74), DOM4-102 (SEQ ID NO:75), DOM4-103 (SEQ ID NO:76), DOM4-104 (SEQ ID NO:77), DOM4-105 (SEQ ID NO:78), DOM4-106 (SEQ ID NO:79), DOM4-107 (SEQ ID NO:80), DOM4-108 (SEQ ID NO:81), DOM4-109 (SEQ ID NO:82), DOM4-110 (SEQ ID NO:83), DOM4-111 (SEQ ID NO:84), DOM4-112 (SEQ ID NO:85), DOM4-113 (SEQ ID NO:86), DOM4-114 (SEQ ID NO:87), DOM4-115 (SEQ ID NO:88), DOM4-116 (SEQ ID NO:89), DOM4-117 (SEQ ID NO:90), DOM4-118 (SEQ ID NO:91), DOM4-119 (SEQ ID NO:92), DOM4-120 (SEQ ID NO:93), DOM4-121 (SEQ ID NO:94), DOM4-122 (SEQ ID NO:95), DOM4-122-1 (SEQ ID NO:96), DOM4-122-2 (SEQ ID NO:97), DOM4-122-3 (SEQ ID NO:98), DOM4-122-4 (SEQ ID NO:99), DOM4-122-5 (SEQ ID NO:100), DOM4-122-6 (SEQ ID NO:101), DOM4-122-7 (SEQ ID NO:102), DOM4-122-8 (SEQ ID NO:103), DOM4-122-9 (SEQ ID NO:104), DOM4-122-10 (SEQ ID NO:105), DOM4-122-11 (SEQ ID NO:106), DOM4-122-12 (SEQ ID NO:107), DOM4-122-13 (SEQ ID NO:108), DOM4-122-14 (SEQ ID NO:109), DOM4-122-15 (SEQ ID NO:110), DOM4-122-16 (SEQ ID NO:111), DOM4-122-17 (SEQ ID NO:112), DOM4-122-18 (SEQ ID NO:113), DOM4-122-19 (SEQ ID NO:114), DOM4-122-20 (SEQ ID NO:115), DOM4-122-21 (SEQ ID NO:116), DOM4-122-22 (SEQ ID NO:117), DOM4-122-25 (SEQ ID NO:118), DOM4-122-26 (SEQ ID NO:119), DOM4-122-27 (SEQ ID NO:120), DOM4-122-28 (SEQ ID NO:121), DOM4-122-29 (SEQ ID NO:122), DOM4-122-30 (SEQ ID NO:123), DOM4-122-31 (SEQ ID NO:124), DOM4-122-32 (SEQ ID NO:125), DOM4-122-33 (SEQ ID NO:126), DOM4-122-34 (SEQ ID NO:127), DOM4-122-35 (SEQ ID NO:128), DOM4-122-36 (SEQ ID NO:129), DOM4-122-37 (SEQ ID NO:130), DOM4-122-38 (SEQ ID NO:131), DOM4-122-39 (SEQ ID NO:132), DOM4-122-40 (SEQ ID NO:133), DOM4-122-41 (SEQ ID NO:134), DOM4-122-42 (SEQ ID NO:135), DOM4-122-43 (SEQ ID NO:136), DOM4-122-44 (SEQ ID NO:137), DOM4-122-45 (SEQ ID NO:138), DOM4-122-46 (SEQ ID NO:139), DOM4-122-47 (SEQ ID NO:140), DOM4-122-48 (SEQ ID NO:141), DOM4-122-49 (SEQ ID NO:142), DOM4-122-50 (SEQ ID NO:143), DOM4-122-51 (SEQ ID NO:144), DOM4-122-52 (SEQ ID NO:145), DOM4-122-54 (SEQ ID NO:146), DOM4-122-55 (SEQ ID NO:147), DOM4-122-56 (SEQ ID NO:148), DOM4-122-57 (SEQ ID NO:149), DOM4-122-58 (SEQ ID NO:150), DOM4-122-59 (SEQ ID NO:151), DOM4-122-60 (SEQ ID NO:152), DOM4-122-61 (SEQ ID NO:153), DOM4-122-62 (SEQ ID NO:154), DOM4-122-63 (SEQ ID NO:155), DOM4-122-64 (SEQ ID NO:156), DOM4-122-65 (SEQ ID NO:157), DOM4-122-66 (SEQ ID NO:158), DOM4-122-67 (SEQ ID NO:159), DOM4-122-68 (SEQ ID NO:160), DOM4-122-69 (SEQ ID NO:161), DOM4-122-70 (SEQ ID NO:162), DOM4-122-71 (SEQ ID NO:163), DOM4-122-72 (SEQ ID NO:164), DOM4-122-73 (SEQ ID NO:165), DOM4-123 (SEQ ID NO:166), DOM4-124 (SEQ ID NO:167) DOM4-125 (SEQ ID NO:168), DOM4-126 (SEQ ID NO:169), DOM4-127 (SEQ ID NO:170), DOM4-128 (SEQ ID NO:171), DOM4-129 (SEQ ID NO:172), DOM4-129-1 (SEQ ID NO:173), DOM4-129-2 (SEQ ID NO:174), DOM4-129-3 (SEQ ID NO:175), DOM4-129-4 (SEQ ID NO:176), DOM4-129-5 (SEQ ID NO:177), DOM4-129-6 (SEQ ID NO:178), DOM4-129-7 (SEQ ID NO:179), DOM4-129-8 (SEQ ID NO:180), DOM4-129-9 (SEQ ID NO:181), DOM4-129-10 (SEQ ID NO:182), DOM4-129-11 (SEQ ID NO:183), DOM4-129-12 (SEQ ID NO:184), DOM4-129-13 (SEQ ID NO:185), DOM4-129-14 (SEQ ID NO:186), DOM4-129-15 (SEQ ID NO:187), DOM4-129-16 (SEQ ID NO:188), DOM4-129-17 (SEQ ID NO:189), DOM4-129-18 (SEQ ID NO:190), DOM4-129-19 (SEQ ID NO:191), DOM4-129-20 (SEQ ID NO:192), DOM4-129-21 (SEQ ID NO:193), DOM4-129-22 (SEQ ID NO:194), DOM4-129-23 (SEQ ID NO:195), DOM4-129-24 (SEQ ID NO:196), DOM4-129-25 (SEQ ID NO:197), DOM4-129-26 (SEQ ID NO:198), DOM4-129-27 (SEQ ID NO:199), DOM4-129-28 (SEQ ID NO:200), DOM4-129-29 (SEQ ID NO:201), DOM4-129-31 (SEQ ID NO:202), DOM4-129-32 (SEQ ID NO:203), DOM4-129-33 (SEQ ID NO:204), DOM4-129-34 (SEQ ID NO:205), DOM4-129-35 (SEQ ID NO:206), DOM4-129-37 (SEQ ID NO:207), DOM4-129-38 (SEQ ID NO:208), DOM4-129-39 (SEQ ID NO:209), DOM4-129-40 (SEQ ID NO:210), DOM4-129-41 (SEQ ID NO:211), DOM4-129-42 (SEQ ID NO:212), DOM4-129-43 (SEQ ID NO:213), DOM4-129-44 (SEQ ID NO:214), DOM4-130 (SEQ ID NO:215), DOM4-130-1 (SEQ ID NO:216), DOM4-130-2 (SEQ ID NO:217), DOM4-130-3 (SEQ ID NO:218), DOM4-130-4 (SEQ ID NO:219), DOM4-130-5 (SEQ ID NO:220), DOM4-130-6 (SEQ ID NO:221), DOM4-130-7 (SEQ ID NO:222), DOM4-130-8 (SEQ ID NO:223), DOM4-130-9 (SEQ ID NO:224), DOM4-130-10 (SEQ ID NO:225), DOM4-130-11 (SEQ ID NO:226), DOM4-130-12 (SEQ ID NO:227), DOM4-130-13 (SEQ ID NO:228), DOM4-130-14 (SEQ ID NO:229), DOM4-130-15 (SEQ ID NO:230), DOM4-130-16 (SEQ ID NO:231), DOM4-130-17 (SEQ ID NO:232), DOM4-130-18 (SEQ ID NO:233), DOM4-130-19 (SEQ ID NO:234), DOM4-130-20 (SEQ ID NO:235), DOM4-130-21 (SEQ ID NO:236), DOM4-130-22 (SEQ ID NO:237), DOM4-130-23 (SEQ ID NO:238), DOM4-130-24 (SEQ ID NO:239), DOM4-130-25 (SEQ ID NO:240), DOM4-130-26 (SEQ ID NO:241), DOM4-130-27 (SEQ ID NO:242), DOM4-130-28 (SEQ ID NO:243), DOM4-130-31 (SEQ ID NO:244), DOM4-130-32 (SEQ ID NO:245), DOM4-130-33 (SEQ ID NO:246), DOM4-130-34 (SEQ ID NO:247), DOM4-130-35 (SEQ ID NO:248), DOM4-130-36 (SEQ ID NO:249), DOM4-130-37 (SEQ ID NO:250), DOM4-130-38 (SEQ ID NO:251), DOM4-130-39 (SEQ ID NO:252), DOM4-130-40 (SEQ ID NO:253), DOM4-130-41 (SEQ ID NO:254), DOM4-130-42 (SEQ ID NO:255), DOM4-130-43 (SEQ ID NO:256), DOM4-130-44 (SEQ ID NO:257), DOM4-130-45 (SEQ ID NO:258), DOM4-130-46 (SEQ ID NO:259), DOM4-130-47 (SEQ ID NO:260), DOM4-130-48 (SEQ ID NO:261), DOM4-130-49 (SEQ ID NO:262), DOM4-130-50 (SEQ ID NO:263), DOM4-130-51 (SEQ ID NO:264), DOM4-130-52 (SEQ ID NO:265), DOM4-130-53 (SEQ ID NO:266), DOM4-130-54 (SEQ ID NO:267), DOM4-130-55 (SEQ ID NO:268), DOM4-130-56 (SEQ ID NO:269), DOM4-130-57 (SEQ ID NO:270), DOM4-130-58 (SEQ ID NO:271), DOM4-130-59 (SEQ ID NO:272), DOM4-130-60 (SEQ ID NO:273), DOM4-130-61 (SEQ ID NO:274), DOM4-130-62 (SEQ ID NO:275), DOM4-130-63 (SEQ ID NO:276), DOM4-130-64 (SEQ ID NO:277), DOM4-130-65 (SEQ ID NO:278), DOM4-130-66 (SEQ ID NO:279), DOM4-130-67 (SEQ ID NO:280), DOM4-130-68 (SEQ ID NO:281), DOM4-130-69 (SEQ ID NO:282), DOM4-130-70 (SEQ ID NO:283), DOM4-130-71 (SEQ ID NO:284), DOM4-130-72 (SEQ ID NO:285), DOM4-130-73 (SEQ ID NO:286), DOM4-130-74 (SEQ ID NO:287), DOM4-130-75 (SEQ ID NO:288), DOM4-130-76 (SEQ ID NO:289), DOM4-130-77 (SEQ ID NO:290), DOM4-130-78 (SEQ ID NO:291), DOM4-130-79 (SEQ ID NO:292), DOM4-130-80 (SEQ ID NO:293), DOM4-130-81 (SEQ ID NO:294), DOM4-130-82 (SEQ ID NO:295), DOM4-130-83 (SEQ ID NO:296), DOM4-130-84 (SEQ ID NO:297), DOM4-130-85 (SEQ ID NO:298), DOM4-130-86 (SEQ ID NO:299), DOM4-130-87 (SEQ ID NO:300), DOM4-130-88 (SEQ ID NO:301), DOM4-130-89 (SEQ ID NO:302), DOM4-130-90 (SEQ ID NO:303), DOM4-130-91 (SEQ ID NO:304), DOM4-130-92 (SEQ ID NO:305), DOM4-130-93 (SEQ ID NO:306), DOM4-130-94 (SEQ ID NO:307), DOM4-130-95 (SEQ ID NO:308), DOM4-130-96 (SEQ ID NO:309), DOM4-130-97 (SEQ ID NO:310), DOM4-130-98 (SEQ ID NO:311), DOM4-130-99 (SEQ ID NO:312), DOM4-130-100 (SEQ ID NO:313), DOM4-130-101 (SEQ ID NO:314), DOM4-130-102 (SEQ ID NO:315), DOM4-130-103 (SEQ ID NO:316), DOM4-130-104 (SEQ ID NO:317), DOM4-130-105 (SEQ ID NO:318), DOM4-130-106 (SEQ ID NO:319), DOM4-130-107 (SEQ ID NO:320), DOM4-130-108 (SEQ ID NO:321), DOM4-130-109 (SEQ ID NO:322), DOM4-130-110 (SEQ ID NO:323), DOM4-130-111 (SEQ ID NO:324), DOM4-130-112 (SEQ ID NO:325), DOM4-130-113 (SEQ ID NO:326), DOM4-130-114 (SEQ ID NO:327), DOM4-130-115 (SEQ ID NO:328), DOM4-130-116 (SEQ ID NO:329), DOM4-130-117 (SEQ ID NO:330), DOM4-130-118 (SEQ ID NO:331), DOM4-130-119 (SEQ ID NO:332), DOM4-130-120 (SEQ ID NO:333), DOM4-130-121 (SEQ ID NO:334), DOM4-130-122 (SEQ ID NO:335), DOM4-130-123 (SEQ ID NO:336), DOM4-130-124 (SEQ ID NO:337), DOM4-130-125 (SEQ ID NO:338), DOM4-130-126 (SEQ ID NO:339), DOM4-130-127 (SEQ ID NO:340), DOM4-130-128 (SEQ ID NO:341), DOM4-130-129 (SEQ ID NO:342), DOM4-130-130 (SEQ ID NO:343), DOM4-130-131 (SEQ ID NO:344), DOM4-130-132 (SEQ ID NO:345), DOM4-130-133 (SEQ ID NO:346), DOM4-131 (SEQ ID NO:347), DOM4-132 (SEQ ID NO:348), and DOM4-133 (SEQ ID NO:349).

[0013] Preferably, the antagonist of IL-1R1 comprises a polypeptide domain that has binding specificity for IL-1R1 binds human IL-1R1 with an affinity (KD) of about 300 nM to about 5 pM, as determined by surface plasmon resonance.

[0014] In some embodiments, the antagonist of IL-1R1 further comprises a half-life extending moiety. The half-life extending moiety can be, for example, a polyalkylene glycol moiety, serum albumin or a fragment thereof, transferrin receptor or a transferrin-binding portion thereof, or an antibody or antibody fragment comprising a binding site for a polypeptide that enhances half-life in vivo. In some embodiments, the half-life extending moiety is a polyethylene glycol moiety.

[0015] In other embodiments, the half-life extending moiety is an antibody or antibody fragment comprising a binding site for serum albumin or neonatal Fc receptor. For example, the half-life extending moiety can be an immunoglobulin single variable domain that binds serum albumin or neonatal Fc receptor.

[0016] In particular embodiments, the half-life extending moiety is an immunoglobulin single variable domain that competes with a dAb selected from the group consisting of DOM7m-16 (SEQ ID NO:723), DOM7m-12 (SEQ ID NO:724), DOM7m-26 (SEQ ID NO:725), DOM7r-1 (SEQ ID NO:726), DOM7r-3 (SEQ ID NO:727), DOM7r-4 (SEQ ID NO:728), DOM7r-5 (SEQ ID NO:729), DOM7r-7 (SEQ ID NO:730), DOM7r-8 (SEQ ID NO:731), DOM7h-2 (SEQ ID NO:732), DOM7h-3 (SEQ ID NO:733), DOM7h-4 (SEQ ID NO:734), DOM7h-6 (SEQ ID NO:735), DOM7h-1 (SEQ ID NO:736), DOM7h-7 (SEQ ID NO:737), DOM7h-22 (SEQ ID NO:739), DOM7h-23 (SEQ ID NO:740), DOM7h-24 (SEQ ID NO:741), DOM7h-25 (SEQ ID NO:742), DOM7h-26 (SEQ ID NO:743), DOM7h-21 (SEQ ID NO:744), DOM7h-27 (SEQ ID NO:745), DOM7h-8 (SEQ ID NO:746), DOM7r-13 (SEQ ID NO:747), DOM7r-14 (SEQ ID NO:748), DOM7r-15 (SEQ ID NO:749), DOM7r-16 (SEQ ID NO:750), DOM7r-17 (SEQ ID NO:751), DOM7r-18 (SEQ ID NO:752), DOM7r-19 (SEQ ID NO:753), DOM7r-20 (SEQ ID NO:754), DOM7r-21 (SEQ ID NO:755), DOM7r-22 (SEQ ID NO:756), DOM7r-23 (SEQ ID NO:757), DOM7r-24 (SEQ ID NO:758), DOM7r-25 (SEQ ID NO:759), DOM7r-26 (SEQ ID NO:760), DOM7r-27 (SEQ ID NO:761), DOM7r-28 (SEQ ID NO:762), DOM7r-29 (SEQ ID NO:763), DOM7r-30 (SEQ ID NO:764), DOM7r-31 (SEQ ID NO:765), DOM7r-32 (SEQ ID NO:766), DOM7r-33 (SEQ ID NO:767), Sequence A (SEQ ID NO:768), Sequence B (SEQ ID NO:769), Sequence C (SEQ ID NO:770), Sequence D (SEQ ID NO:771), Sequence E (SEQ ID NO:772), Sequence F (SEQ ID NO:773), Sequence G (SEQ ID NO:774), Sequence H (SEQ ID NO:775), Sequence I (SEQ ID NO:776), Sequence J (SEQ ID NO:777), Sequence K (SEQ ID NO:778), Sequence L (SEQ ID NO:779), Sequence M (SEQ ID NO:780), Sequence N (SEQ ID NO:781), Sequence O (SEQ ID NO:782), Sequence P (SEQ ID NO:783), and Sequence Q (SEQ ID NO:784), for binding to human serum albumin.

[0017] In other embodiments, the half-life extending moiety is an immunoglobulin single variable domain that binds human serum albumin and comprises an amino acid sequence selected from the group consisting of DOM7m-16 (SEQ ID NO:723), DOM7m-12 (SEQ ID NO:724), DOM7m-26 (SEQ ID NO:725), DOM7r-1 (SEQ ID NO:726), DOM7r-3 (SEQ ID NO:727), DOM7r-4 (SEQ ID NO:728), DOM7r-5 (SEQ ID NO:729), DOM7r-7 (SEQ ID NO:730), DOM7r-8 (SEQ ID NO:731), DOM7h-2 (SEQ ID NO:732), DOM7h-3 (SEQ ID NO:733), DOM7h-4 (SEQ ID NO:734), DOM7h-6 (SEQ ID NO:735), DOM7h-1 (SEQ ID NO:736), DOM7h-7 (SEQ ID NO:737), DOM7h-22 (SEQ ID NO:739), DOM7h-23 (SEQ ID NO:740), DOM7h-24 (SEQ ID NO:741), DOM7h-25 (SEQ ID NO:742), DOM7h-26 (SEQ ID NO:743), DOM7h-21 (SEQ ID NO:744), DOM7h-27 (SEQ ID NO:745), DOM7h-8 (SEQ ID NO:746), DOM7r-13 (SEQ ID NO:747), DOM7r-14 (SEQ ID NO:748), DOM7r-15 (SEQ ID NO:749), DOM7r-16 (SEQ ID NO:750), DOM7r-17 (SEQ ID NO:751), DOM7r-18 (SEQ ID NO:752), DOM7r-19 (SEQ ID NO:753), DOM7r-20 (SEQ ID NO:754), DOM7r-21 (SEQ ID NO:755), DOM7r-22 (SEQ ID NO:756), DOM7r-23 (SEQ ID NO:757), DOM7r-24 (SEQ ID NO:758), DOM7r-25 (SEQ ID NO:759), DOM7r-26 (SEQ ID NO:760), DOM7r-27 (SEQ ID NO:761), DOM7r-28 (SEQ ID NO:762), DOM7r-29 (SEQ ID NO:763), DOM7r-30 (SEQ ID NO:764), DOM7r-31 (SEQ ID NO:765), DOM7r-32 (SEQ ID NO:766), DOM7r-33 (SEQ ID NO:767), Sequence A (SEQ ID NO:768), Sequence B (SEQ ID NO:769), Sequence C (SEQ ID NO:770), Sequence D (SEQ ID NO:771), Sequence E (SEQ ID NO:772), Sequence F (SEQ ID NO:773), Sequence G (SEQ ID NO:774), Sequence H (SEQ ID NO:775), Sequence I (SEQ ID NO:776), Sequence J (SEQ ID NO:777), Sequence K (SEQ ID NO:778), Sequence L (SEQ ID NO:779), Sequence M (SEQ ID NO:780), Sequence N (SEQ ID NO:781), Sequence O (SEQ ID NO:782), Sequence P (SEQ ID NO:783), and Sequence Q (SEQ ID NO:784).

[0018] If desired, the antagonist of IL-1R1 further comprises a polypeptide binding domain that has binding specificity for Tumor Necrosis Factor Receptor 1 (TNFR1, p55) and inhibits binding of Tumor Necrosis Factor Alpha (TNFα) to TNFR1.

[0019] Preferably, the antagonist of IL-1R1 binds human IL-1R1 with an affinity (KD) of about 300 nM to about 5 pM, as determined by surface plasmon resonance.

[0020] In more particular aspects, the invention relates to the use of an antagonist of Interleukin-1 Receptor Type 1 (IL-1R1) for the manufacture of a medicament for treating a respiratory disease, wherein said antagonist of IL-1R1 is a fusion protein or a conjugate comprising an antagonist of IL-1R1 moiety and a half-life extending moiety, wherein said antagonist of IL-1R1 moiety binds human IL-IR1 and inhibits binding of a ligand selected from the group consisting of Interleukin-1 (IL-1α) and Interleukin-1β (IL-1β) to human IL-1R1, and said half-life extending moiety is a polypeptide binding moiety that contains a binding site with binding specificity for a polypeptide that enhances serum half-life in vivo.

[0021] In some embodiments, the antagonist of IL-1R1 moiety is human Interleukin 1 receptor antagonist (IL-1ra) or a functional variant of human IL-1ra. In other embodiments, the antagonist of IL-1R1moiety is an immunoglobulin single variable domain that competes for binding to IL-1R1 with an anti-IL-1R1 dAb disclosed herein, or the antagonist of IL-1R1 moiety is an immunoglobulin single variable domain that comprises an amino acid sequence that has at least about 90% amino acid sequence identity with an amino acid sequence of a dAb disclosed herein.

[0022] The half-life extending moiety can be serum albumin or a fragment thereof, transferrin receptor or a transferrin-binding portion thereof, or an antibody or antibody fragment comprising a binding site for a polypeptide that enhances half-life in vivo. In particular embodiments, the half-life extending moiety is an immunoglobulin single variable domain that binds serum albumin and competes with an anti-serum albumin dAb disclosed herein for binding to serum albumin. In other embodiments, the half-life extending moiety is an immunoglobulin single variable domain that binds human serum albumin comprises the amino acid sequence of an anti-serum albumin dAb disclosed herein.

[0023] In more particular aspects, the invention relates to use of an antagonist of Interleukin-1 Receptor Type 1 (IL-1R1) for the manufacture of a medicament for treating a respiratory disease, wherein said antagonist of IL-1R1 comprises an immunoglobulin single variable domain that has binding specificity for human IL-1R1 and inhibits binding of a ligand selected from the group consisting of Interleukin-1α (IL-1α) and Interleukin-1β (IL-1β) to human IL-1R1, and a polyethylene glycol moiety. In one embodiment, the immunoglobulin single variable domain competes for binding to human IL-1R1 with an anti-IL-IR1 dAb disclosed herein. In another embodiment, the immunoglobulin single variable domain binds human serum albumin and comprises the amino acid sequence of an anti-serum albumin dAb disclosed herein.

[0024] The invention also relates to a pharmaceutical composition comprising an antagonist of IL-1R1 as described herein and a physiologically acceptable vehicle or carrier. In some embodiment, the pharmaceutical composition comprises a physiologically acceptable vehicle or carrier for parenteral administration (e.g., intravenous administration, subcutaneous administration). In other embodiment, the pharmaceutical composition comprises a physiologically acceptable vehicle or carrier for local administration (e.g., local administration to pulmonary tissue, such as by inhalation or intra-nasal administration. I

[0025] The invention also relates to a drug delivery device comprising a pharmaceutical composition of the invention. For example, the drug deliver device can be a parenteral delivery device, intravenous delivery device, intramuscular delivery device, intraperitoneal delivery device, transdermal delivery device, pulmonary delivery device, intraarterial delivery device, intrathecal delivery device, intraarticular delivery device, subcutaneous delivery device, intranasal delivery device, vaginal delivery device, and rectal delivery device. In particular embodiments the drug delivery device is selected from the group consisting of a syringe, a transdermal delivery device, a capsule, a tablet, a nebulizer, an inhaler, an atomizer, an aerosolizer, a mister, a dry powder inhaler, a metered dose inhaler, a metered dose sprayer, a metered dose mister, a metered dose atomizer, and a catheter.

[0026] The invention also relates to a method for treating a respiratory disease comprising administering to a subject in need thereof an effective amount of an antagonist of IL-1R1 as described herein.

### BRIEF DESCRIPTION OF THE DRAWINGS

[0027] FIGS. 1A and 1B are graphs showing the results of in vitro assays in which dAbs were tested for the ability to inhibit IL-1-induced IL-8 release from cultured MRC-5 cells (ATCC catalogue no. CCL-171). FIG. 1A shows a typical dose-response curve for an anti-IL-1R1 dAb referred to as DOM4-130 in such a cell assay. The ND₅₀ of DOM4-130 in the assay was approximately 500-1000 nM.

[0028] FIG. 1B shows a dose-response curve for anti-IL-1R1 dAbs referred to as DOM4-122 and DOM4-129 in such a cell assay. The ND50 values of both dAbs was about 1 μM.

[0029] FIGS. 2A and 2B are graphs showing the results of in vitro assays in which dAbs that underwent affinity maturation were tested for the ability to inhibit IL-1-induced IL-8 release from cultured MRC-5 cells (ATCC catalogue no. CCL-171).

[0030] FIG. 2A shows a dose-response curve for DOM4-130-3, which is an affinity matured variant of DOM4-130. The ND₅₀ for DOM4-130-3 in the assay was about 30 nM, compared to the ND50 for DOM4-130 which was 500-1000 nM (see FIG. 1A). FIG. 2B shows a dose-response curve for DOM4-130-46 and DOM4-130-51, which are affinity matured variants of DOM4-130, and for interleukin 1 receptor antagonist (IL-1ra). The ND₅₀ for DOM4-130-46 was about 1 nM in the assay, and the ND₅₀ for DOM4-130-51 about 300 pM).

[0031] FIG. 3 is a graph showing the results of in vitro assays in which dAbs that underwent affinity maturation were tested for the ability to inhibit IL-1-induced IL-8 release from cultured MRC-5 cells (ATCC catalogue no. CCL-171). FIG. 3 shows a dose-response curve for DOM4-122-6, DOM4-129-1, DOM4-122-23, and IL-1ra. DOM4-122-6 and DOM4-122-23 are affinity matured variants of DOM4-122, and DOM4-129-1 is an affinity matured variant of DOM4-129. Both DOM4-122-6 and DOM4-129-1 had an ND₅₀ of about 10 nM in the assay, and DOM4-122-23 had an ND₅₀ of approximately 1 nM in the assay.

[0032] FIG. 4 is a graph showing the results of an in vitro assay in which dAbs were tested for the ability to inhibit IL-1-induced IL-6 release in human whole blood. The results show that an IL-1R1 control antibody (a-IL-1R1Ab igG1), anti-IL-1R1 dAb (DOM4-130-54) and a dual specific format that contained an anti-IL-1R1 dAb and an anti-serum albumin dAb (DOM4-130-54/7h-8) each inhibited release of IL-6 in the assay, but that a dAb that binds serum albumin (DOM7h-8) did not.

[0033] FIG. 5 is a plot showing that an antagonist of IL-1R1 (IL1ra, a fusion protein in which IL-1ra was fused to an immunoglobulin single variable domain that binds mouse serum albumin) was efficacious in a subchronic model of tobacco smoke-induced (TS) chronic obstructive pulmonary disease (COPD) in C57BL/6 mice when administered intraperitoneally (10 mg/kg i.p.). The plot also shows that administration of IL-1R1 together with a dAb that binds TNFR1 was even more efficacious in a subchronic model of tobacco smoke-induced (TS) chronic obstructive pulmonary disease (COPD) in C57BL/6 mice when administered intraperitoneally. The plot shows the total number of cells present in bronchoalveolar lavage (BAL) of mice at completion of the study described in Example 2. The individual data points for each mouse in the study and the group averages (means; horizontal lines) are shown. The results show that antagonist of IL-1R1 reduced the number of cells in BAL by 58% compared to the untreated group (Veh), and that coadministration of the antagonist of IL-1R1 and an antagonist of TNFR1 reduced the number of cells in BAL by 88%. In contrast administration of ENBREL® (etanercept; Immunex Corporation) resulted in an increased number of total cells in BAL, although the increase was not statistically significant. TS, tobacco smoke-induced; Veh, vehicle; ns, not statistically significant.

[0034] FIG. 6 is a graph showing the levels of an immunoglobulin single variable domain that binds hen egg lysozyme (HEL-4) in the BAL at several time points after administration of the single variable domain to mice by pulmonary delivery. The graph shows HEL-4 was delivered efficiently into the deep lung. A dose related effect was observed. At 2 hours after administration, a maximum level of 700 ug/ml was detected in the lung with the 30 mg/kg dosing. The levels in the BAL are high for a prolonged period of time and declined gradually. The graph indicates that there was a slow release of HEL-4 into the surrounding tissues.

[0035] FIG. 7 is a graph showing the levels of HEL-4 in the serum at several time points after administration of the single variable domain to mice by pulmonary delivery. The graph shows that HEL-4 serum levels were detected in the 3 mg/kg and the 30 mg/kg dose groups. The serum levels showed a similar pattern as the BAL levels. There appeared to be a maximum level 2 hours after administration, followed by a slow decline. At 2 hours after administration, maximum levels of 3.5 μg/ml were detected in the serum with the 30 mg/kg dosing.

[0036] FIG. 8 is a graph showing the levels of IL-1ra (KINARET® (anakinra; Amgen)) in the BAL, lung tissue and serum at several time points after administration to mice by pulmonary delivery. The level in BAL was maximum at 1 hour after administration and was ˜11 μg/ml (˜2.75 μg in 0.25 ml of BAL fluid). The levels in the BAL were high for a prolonged period of time and show a gradual decline over 24 hrs. (>10-fold decline after 24 hrs). The levels in lung tissue was maximum at 1 hr and was ˜3.3 μg/ml. The levels in the lung were high for a prolonged period of time and show a gradual decline over 24 hrs. (>10-fold decline after 24 hrs). The level in the serum at 1 hr was lower than in BAL or lung tissue (260 ng/ml). At 5 hrs the levels in the serum was maximum (350 ng/ml). The levels in the serum show a slow decline and after 24 hrs there is only a 5-fold decline in the levels.

[0037] FIG. 9A-9 illustrates the amino acid sequences of several human dAbs that bind human IL-1R1. In some of the sequences, the amino acids of CDR1, CDR2 and CDR3 are underlined.

[0038] FIG. 10A-10BBB illustrates the nucleotide sequences of nucleic acids that encode the human dAbs shown in FIG. 9A-9X. In some of the sequences, the nucleotides encoding CDR1, CDR2 and CDR3 are underlined.

[0039] FIG. 11A is an alignment of the amino acid sequences of three VKS selected by binding to mouse serum albumin (MSA). The aligned amino acid sequences are from VKS designated MSA16, which is also referred to as DOM7m-16 (SEQ ID NO:723), MSA 12, which is also referred to as DOM7m-12 (SEQ ID NO:724), and MSA 26, which is also referred to as DOM7m-26 (SEQ ID NO:725).

[0040] FIG. 11B is an alignment of the amino acid sequences of six VKS selected by binding to rat serum albumin (RSA). The aligned amino acid sequences are from Vκs designated DOM7r-1 (SEQ ID NO:726), DOM7r-3 (SEQ ID NO:727), DOM7r-4 (SEQ ID NO:728), DOM7r-5 (SEQ ID NO:729), DOM7r-7 (SEQ ID NO:730), and DOM7r-8 (SEQ ID NO:731).

[0041] FIG. 11C is an alignment of the amino acid sequences of six VKS selected by binding to human serum albumin (HSA). The aligned amino acid sequences are from Vκs designated DOM7h-2 (SEQ ID NO:732), DOM7h-3 (SEQ ID NO:733), DOM7h-4 (SEQ ID NO:734), DOM7h-6 (SEQ ID NO:735), DOM7h-1 (SEQ ID NO:736), and DOM7h-7 (SEQ ID NO:737).

[0042] FIG. 11D is an alignment of the amino acid sequences of seven V_{H}s selected by binding to human serum albumin and a consensus sequence (SEQ ID NO:738). The aligned sequences are from V_{H}s designated DOM7h-22 (SEQ ID NO:739), DOM7h-23 (SEQ ID NO:740), DOM7h-24 (SEQ ID NO:741), DOM7h-25 (SEQ ID NO:742), DOM7h-26 (SEQ ID NO:743), DOM7h-21 (SEQ ID NO:744), and DOM7h-27 (SEQ ID NO:745).

[0043] FIG. 11E is an alignment of the amino acid sequences of three VKS selected by binding to human serum albumin and rat serum albumin. The aligned amino acid sequences are from VKS designated DOM7h-8 (SEQ ID NO:746), DOM7r-13 (SEQ ID NO:747), and DOM7r-14 (SEQ ID NO:748).

[0044] FIG. 12 is an illustration of the amino acid sequences of VKS selected by binding to rat serum albumin (RSA). The illustrated sequences are from VKS designated DOM7r-15 (SEQ ID NO:749), DOM7r-16 (SEQ ID NO:750), DOM7r-17 (SEQ ID NO:751), DOM7r-18 (SEQ ID NO:752), DOM7r-19 (SEQ ID NO:753).

[0045] FIG. 13A-13B is an illustration of the amino acid sequences of the amino acid sequences of V_{H}s that bind rat serum albumin (RSA). The illustrated sequences are from V_{H}s designated DOM7r-20 (SEQ ID NO:754), DOM7r-21 (SEQ ID NO:755), DOM7r-22 (SEQ ID NO:756), DOM7r-23 (SEQ ID NO:757), DOM7r-24 (SEQ ID NO:758), DOM7r-25 (SEQ ID NO:759), DOM7r-26 (SEQ ID NO:760), DOM7r-27 (SEQ ID NO:761), DOM7r-28 (SEQ ID NO:762), DOM7r-29 (SEQ ID NO:763), DOM7r-30 (SEQ ID NO:764), DOM7r-31 (SEQ ID NO:765), DOM7r-32 (SEQ ID NO:766), and DOM7r-33 (SEQ ID NO:767).

[0046] FIG. 14A is an illustration of the nucleotide sequence (SEQ ID NO:785) of a nucleic acid encoding human interleukin 1 receptor antagonist (IL-1ra) deposited in GenBank under accession number NM_{—}173842. The nucleic acid has an open reading frame starting at position 65.

[0047] FIG. 14B is an illustration of the amino acid sequence of human IL-1ra (SEQ ID NO:786) encoded by the nucleic acid shown in FIG. 15A (SEQ ID NO:785). The mature protein consists of 152 amino acid residues (amino acid residues 26-177 of SEQ ID NO:786).

[0048] FIG. 15 illustrates the amino acid sequences of several Camelid V_{HH}s that bind mouse serum albumin that are disclosed in WO 2004/041862. Sequence A (SEQ ID NO:768), Sequence B (SEQ ID NO:769), Sequence C (SEQ ID NO:770), Sequence D (SEQ ID NO:771), Sequence E (SEQ ID NO:772), Sequence F (SEQ ID NO:773), Sequence G (SEQ ID NO:774), Sequence H (SEQ ID NO:775), Sequence I (SEQ ID NO:776), Sequence J (SEQ ID NO:777), Sequence K (SEQ ID NO:778), Sequence L (SEQ ID NO:779), Sequence M (SEQ ID NO:780), Sequence N (SEQ ID NO:781), Sequence O (SEQ ID NO:782), Sequence P (SEQ ID NO:783), Sequence Q (SEQ ID NO:784).

### DETAILED DESCRIPTION OF THE INVENTION

[0049] As used herein, “interleukin-1 receptor type 1” (IL-1R1; CD121a) refers to naturally occurring or endogenous mammalian IL-1R1 proteins and to proteins having an amino acid sequence which is the same as that of a naturally occurring or endogenous corresponding mammalian IL-1R1 protein (e.g., recombinant proteins, synthetic proteins (i.e., produced using the methods of synthetic organic chemistry)). Accordingly, as defined herein, the term includes mature protein, polymorphic or allelic variants, and other isoforms of a IL-1R1 (e.g., produced by alternative splicing or other cellular processes), and modified or unmodified forms of the foregoing (e.g., lipidated, glycosylated). Naturally occurring or endogenous IL-1R1 include wild type proteins such as mature IL-1R1, polymorphic or allelic variants and other isoforms which occur naturally in mammals (e.g., humans, non-human primates). Such proteins can be recovered or isolated from a source which naturally produces IL-1R1, for example. These proteins and IL-1R1 proteins having the same amino acid sequence as a naturally occurring or endogenous corresponding IL-1R1, are referred to by the name of the corresponding mammal. For example, where the corresponding mammal is a human, the protein is designated as a human IL-1R1.

[0050] As used herein, “antagonist of interleukin-1 receptor type 1 (IL-1R1) moiety” refers to any compound (e.g., protein, polypeptide, peptide) that binds to IL-1R1 and inhibiting a function of IL-1R1 (e.g., inhibits binding of IL-1α and/or IL-1β to IL-1R1, inhibits signaling through IL-1R1 upon binding of IL-1βand/or IL-1β). An “antagonist of interleukin-1 receptor type 1” comprises an antagonists of interleukin-1 receptor type 1 (IL-1R1) moiety, and can comprise additional moieties if desired. An antagonist of interleukin-1 receptor type 1 (IL-1R1) moiety can be formatted into a variety of suitable structures as described herein.

[0051] As used herein, “antagonist of interleukin-1 receptor type 1 (IL-1R1)” refers to any compound (e.g., polypeptide) that can be administered to an individual to produce a beneficial therapeutic or diagnostic effect though binding to IL-1R1 and inhibiting a function of IL-1R1 in the individual. Preferred “antagonists of IL-1R1” comprise a peptide or polypeptide that binds IL-1R1 and inhibits a function of IL-1R1, such as interleukin-1 receptor antagonist (IL-1ra) and functional variants thereof, and antibodies that bind IL-1R1 and antigen-binding fragments thereof (e.g., dAbs). Antagonists of IL-1R1 include “conjugates,” such as a “covalent antagonist of IL-1R1 conjugate,” and a “noncovalent antagonists of IL-1R1 conjugate.” Antagonists of IL-1R1 also include fusion proteins, such as, an “antagonist of IL-1R1 fusion proteins.”

[0052] The “conjugates” comprise an antagonist of IL-1R1 moiety (e.g., IL-1ra or functional variant thereof, dAb) that is covalently or noncovalently bonded to a polypeptide binding moiety that contains a binding site (e.g., an antigen-binding site) with binding specificity for a polypeptide that enhances serum half-life in vivo (e.g., serum albumin). The antagonist of IL-1R1 moiety can be covalently or noncovalently bonded to a polypeptide binding moiety that contains a binding site (e.g., an antigen-binding site) that has binding specificity for a polypeptide that enhances serum half-life in vivo. The antagonist of IL-1R1 moiety can be covalently or noncovalently bonded to the polypeptide binding moiety directly or indirectly (e.g., through a suitable linker and/or noncovalent binding of complementary binding partners (e.g., biotin and avidin)). When complementary binding partners are employed, one of the binding partners can be covalently bonded to the antagonist of IL-1R1 moiety directly or through a suitable linker moiety, and the complementary binding partner can be covalently bonded to the polypeptide binding moiety directly or through a suitable linker moiety.

[0053] Preferably, the polypeptide binding moiety that has a binding site with binding specificity for a polypeptide that enhances serum half-live in vivo is an antigen-binding fragment of an antibody that binds serum albumin, (e.g., a V_{H}, V_{L}, V_{HH}). For example, the conjugate can be a “covalent antagonist of IL-1R1 conjugate” which refers to conjugates in which the antagonist of IL-1R1 moiety is covalently bonded to the antigen-binding fragment that binds serum albumin directly, or indirectly through a suitable linker moiety. The antagonist of IL-1R1 moiety can be bonded to the antigen-binding fragment at any suitable position, such as the amino-terminus, the carboxyl-terminus or through suitable amino acid side chains (e.g., the ε amino group of lysine). The antagonist of IL-1R1 can also be a “noncovalent antagonist of IL-1R1 conjugate,” which refers to conjugates in the antagonist of IL-1R1 moiety and the antigen-binding fragment of an antibody that binds serum albumin are noncovalently bonded. The antagonist of IL-1R1 moiety can be noncovalently bonded to the antigen-binding fragment directly (e.g., electrostatic interaction, hydrophobic interaction) or indirectly (e.g., through noncovalent binding of complementary binding partners (e.g., biotin and avidin), wherein one partner is covalently bonded to the antagonist of IL-1R1 moiety and the complementary binding partner is covalently bonded to the antigen-binding fragment). When complementary binding partners are employed, one of the binding partners can be covalently bonded to the antagonist of IL-1R1 moiety directly or through a suitable linker moiety, and the complementary binding partner can be covalently bonded to the antigen-binding fragment of an antibody that binds serum albumin directly or through a suitable linker moiety.

[0054] As used herein, “antagonist of IL-1R1 fusion” refers to a fusion protein that comprises an antagonist of interleukin-1 receptor type 1 (IL-1R1) moiety that is a peptide or polypeptide, and an antigen-binding fragment of an antibody that binds serum albumin. The peptide or polypeptide antagonist of interleukin-1 receptor type 1 (IL-1R1) moiety, and the antigen-binding fragment of an antibody that binds serum albumin are present as discrete parts (moieties) of a single continuous polypeptide chain.

[0055] As used herein, “interleukin 1 receptor antagonist” (IL-1ra) refers to naturally occurring or endogenous mammalian IL-1ra proteins and to proteins having an amino acid sequence which is the same as that of a naturally occurring or endogenous corresponding mammalian IL-1ra protein (e.g., recombinant proteins, synthetic proteins (i.e., produced using the methods of synthetic organic chemistry)). Accordingly, as defined herein, the term includes mature protein, polymorphic or allelic variants, and other isoforms of a IL-1ra (e.g., produced by alternative splicing or other cellular processes), and modified or unmodified forms of the foregoing (e.g., lipidated, glycosylated, PEGylated). Naturally occurring or endogenous IL-1ra include wild type proteins such as mature IL-1ra, polymorphic or allelic variants and other isoforms which occur naturally in mammals (e.g., humans, non-human primates). Such proteins can be recovered or isolated from a source which naturally produces IL-1ra, for example. These proteins and IL-1ra proteins having the same amino acid sequence as a naturally occurring or endogenous corresponding IL-1ra, are referred to by the name of the corresponding mammal. For example, where the corresponding mammal is a human, the protein is designated as a human IL-1ra.

[0056] “Functional variants” of IL-1ra include functional fragments, functional mutant proteins, and/or functional fusion proteins which can be produce using suitable methods (e.g., mutagenesis (e.g., chemical mutagenesis, radiation mutagenesis), recombinant DNA techniques). A “functional variant” antagonizes IL-1R1. Generally, fragments or portions of IL-1ra include those having a deletion and/or addition (i.e., one or more amino acid deletions and/or additions) of an amino acid (i.e., one or more amino acids) relative to the mature IL-1ra (such as N-terminal, C-terminal or internal deletions). Fragments or portions in which only contiguous amino acids have been deleted or in which non-contiguous amino acids have been deleted relative to mature IL-1ra are also envisioned.

[0057] A functional variant of human IL-1ra can have at least about 80%, or at least about 85%, or at least about 90%, or at least about 95%, or at least about 96%, or at least about 97%, or at least about 98%, or at least about 99% amino acid sequence identity with the mature 152 amino acid form of human IL-1ra and antagonize human Interleukin-1 type 1 receptor. (See, Eisenberg et al., Nature 343:341-346 (1990).) The variant can comprise one or more additional amino acids (e.g., comprise 153 or 154 or more amino acids). For example, the variant IL-1ra can have an amino acid sequence that consists of an amino-terminal methionine residue followed by residues 26 to 177 of SEQ ID NO:786. (KINERET® (anakinra), Amgen).

[0058] The phrase “immunoglobulin single variable domain” refers to an antibody variable region (V_{H}, V_{HH}, V_{L}) that specifically binds an antigen or epitope independently of other V regions or domains; however, as the term is used herein, an immunoglobulin single variable domain can be present in a format (e.g., homo- or hetero-multimer) with other variable regions or variable domains where the other regions or domains are not required for antigen binding by the single immunoglobulin variable domain (i.e., where the immunoglobulin single variable domain binds antigen independently of the additional variable domains). “Immunoglobulin single variable domain” encompasses not only an isolated antibody single variable domain polypeptide, but also larger polypeptides that comprise one or more monomers of an antibody single variable domain polypeptide sequence. A “domain antibody” or “dAb” is the same as an “immunoglobulin single variable domain” polypeptide as the term is used herein. An immunoglobulin single variable domain polypeptide, as used herein refers to a mammalian immunoglobulin single variable domain polypeptide, preferably human, but also includes rodent (for example, as disclosed in WO 00/29004, the contents of which are incorporated herein by reference in their entirety) or camelid V_{HH} dabs. Camelid dabs are immunoglobulin single variable domain polypeptides which are derived from species including camel, llama, alpaca, dromedary, and guanaco, and comprise heavy chain antibodies naturally devoid of light chain: V_{HH}. V_{HH} molecules are about ten times smaller than IgG molecules, and as single polypeptides, they are very stable, resisting extreme pH and temperature conditions.

[0059] “Complementary” Two immunoglobulin domains are “complementary” where they belong to families of structures which form cognate pairs or groups or are derived from such families and retain this feature. For example, a V_{H} domain and a V_{L} domain of an antibody are complementary; two V_{H} domains are not complementary, and two V_{L} domains are not complementary. Complementary domains may be found in other members of the immunoglobulin superfamily, such as the V_{α} and V_{β} (or γ and δ) domains of the T-cell receptor. Domains which are artificial, such as domains based on protein scaffolds which do not bind epitopes unless engineered to do so, are non-complementary. Likewise, two domains based on (for example) an immunoglobulin domain and a fibronectin domain are not complementary.

[0060] “Domain” A domain is a folded protein structure which retains its tertiary structure independently of the rest of the protein. Generally, domains are responsible for discrete functional properties of proteins, and in many cases may be added, removed or transferred to other proteins without loss of function of the remainder of the protein and/or of the domain. By single antibody variable domain is meant a folded polypeptide domain comprising sequences characteristic of antibody variable domains. It therefore includes complete antibody variable domains and modified variable domains, for example in which one or more loops have been replaced by sequences which are not characteristic of antibody variable domains, or antibody variable domains which have been truncated or comprise N- or C-terminal extensions, as well as folded fragments of variable domains which retain at least in part the binding activity and specificity of the full-length domain.

[0061] “Repertoire” A collection of diverse variants, for example polypeptide variants which differ in their primary sequence. A library used in the present invention will encompass a repertoire of polypeptides comprising at least 1000 members.

[0062] “Library” The term library refers to a mixture of heterogeneous polypeptides or nucleic acids. The library is composed of members, each of which have a single polypeptide or nucleic acid sequence. To this extent, library is synonymous with repertoire. Sequence differences between library members are responsible for the diversity present in the library. The library may take the form of a simple mixture of polypeptides or nucleic acids, or may be in the form of organisms or cells, for example bacteria, viruses, animal or plant cells and the like, transformed with a library of nucleic acids. Preferably, each individual organism or cell contains only one or a limited number of library members. Advantageously, the nucleic acids are incorporated into expression vectors, in order to allow expression of the polypeptides encoded by the nucleic acids. In a preferred aspect, therefore, a library may take the form of a population of host organisms, each organism containing one or more copies of an expression vector containing a single member of the library in nucleic acid form which can be expressed to produce its corresponding polypeptide member. Thus, the population of host organisms has the potential to encode a large repertoire of genetically diverse polypeptide variants.

[0063] “Antibody” An antibody (for example IgG, IgM, IgA, IgD or IgE) or fragment (such as a Fab, F(ab′)₂, Fv, disulphide linked Fv, scFv, closed conformation multispecific antibody, disulphide-linked scFv, diabody) whether derived from any species naturally producing an antibody, or created by recombinant DNA technology; whether isolated from serum, B-cells, hybridomas, transfectomas, yeast or bacteria).

[0064] “Dual-specific ligand” A ligand comprising a first immunoglobulin single variable domain and a second immunoglobulin single variable domain as herein defined, wherein the variable regions are capable of binding to two different antigens or two epitopes on the same antigen which are not normally bound by a monospecific immunoglobulin. For example, the two epitopes may be on the same hapten, but are not the same epitope or sufficiently adjacent to be bound by a monospecific ligand. The dual specific ligands according to the invention are composed of variable domains which have different specificities, and do not contain mutually complementary variable domain pairs which have the same specificity. Dual-specific ligands and suitable methods for preparing dual-specific ligands are disclosed in WO 2004/058821, WO 2004/003019, and WO 03/002609, the entire teachings of each of these published international applications are incorporated herein by reference.

[0065] “Antigen” A molecule that is bound by a ligand according to the present invention. Typically, antigens are bound by antibody ligands and are capable of raising an antibody response in vivo. It may be a polypeptide, protein, nucleic acid or other molecule. Generally, the dual specific ligands according to the invention are selected for target specificity against a particular antigen. In the case of conventional antibodies and fragments thereof, the antibody binding site defined by the variable loops (L1, L2, L3 and H1, H2, H3) is capable of binding to the antigen.

[0066] “Epitope” A unit of structure conventionally bound by an immunoglobulin V_{H}/V_{L} pair. Epitopes define the minimum binding site for an antibody, and thus represent the target of specificity of an antibody. In the case of a single domain antibody, an epitope represents the unit of structure bound by a variable domain in isolation.

[0067] “Universal framework” A single antibody framework sequence corresponding to the regions of an antibody conserved in sequence as defined by Kabat (“Sequences of Proteins of Immunological Interest”, US Department of Health and Human Services) or corresponding to the human germline immunoglobulin repertoire or structure as defined by Chothia and Lesk, (1987) J. Mol. Biol. 196:910-917. The invention provides for the use of a single framework, or a set of such frameworks, which has been found to permit the derivation of virtually any binding specificity though variation in the hypervariable regions alone.

[0068] “Half-life” The time taken for the serum concentration of the ligand to reduce by 50%, in vivo, for example due to degradation of the ligand and/or clearance or sequestration of the ligand by natural mechanisms. The ligands of the invention are stabilised in vivo and their half-life increased by binding to molecules which resist degradation and/or clearance or sequestration. Typically, such molecules are naturally occurring proteins which themselves have a long half-life in vivo. The half-life of a ligand is increased if its functional activity persists, in vivo, for a longer period than a similar ligand which is not specific for the half-life increasing molecule. Thus, a ligand specific for HSA and a target molecule is compared with the same ligand wherein the specificity for HSA is not present, that it does not bind HSA but binds another molecule. For example, it may bind a second epitope on the target molecule. Typically, the half life is increased by 10%, 20%, 30%, 40%, 50% or more. Increases in the range of 2×, 3×, 4×, 5×, 10Δ, 20×, 30×, 40×, 50× or more of the half life are possible. Alternatively, or in addition, increases in the range of up to 30×, 40×, 50×, 60×, 70×, 80×, 90×, 100×, 150× of the half life are possible.

[0069] As used herein, the term “antagonist of Tumor Necrosis Factor Receptor 1 (TNFR1)” refers to an agent (e.g., a molecule, a compound) which binds TNFR1 and can inhibit a (i.e., one or more) function of TNFR1. For example, an antagonist of TNFR1 can inhibit the binding of TNFα to TNFR1 and/or inhibit signal transduction mediated through TNFR1. Accordingly, TNFR1-mediated processes and cellular responses (e.g., TNFα-induced cell death in a standard L929 cytotoxicity assay) can be inhibited with an antagonist of TNFR1. An antagonist of TNFR1 can be, for example, a small organic molecule, natural product, protein, peptide or peptidomimetic. Antagonists of TNFR1 can be identified, for example, by screening libraries or collections of molecules, such as, the Chemical Repository of the National Cancer Institute, as described herein or using other suitable methods. Preferred antagonists of TNFR1 are antibodies and antigen-binding fragments of antibodies (e.g., dAb monomers).

[0070] The invention relates to use of an antagonist of IL-1R1 for the manufacture of a medicament preventing, treating, or mitigating lung inflammation or a respiratory disease, such as those described herein (e.g., chronic obstructive respiratory disease (COPD), asthma). Preferably, the medicament is for pulmonary delivery. The invention also relates to methods for preventing, treating, or mitigating lung inflammation or a respiratory disease comprising administering to a subject in need thereof a therapeutically effective amount of antagonist of IL-1R1. Preferably, the method comprises administering the antagonist of IL-1R1 via pulmonary delivery. The invention also relates to pharmaceutical compositions for preventing, treating, or mitigating lung inflammation or a respiratory disease, such as those described herein (e.g., chronic obstructive respiratory disease, asthma), comprising as an active ingredient an antagonist of IL-1R1. Preferably, the pharmaceutical composition is for pulmonary delivery.

[0071] As described herein, polypeptide antagonists of IL-1R1 can be administered to a subject in need thereof to prevent, treat or mitigate lung inflammation, a respiratory disease or the symptoms thereof. For example, described herein are the results of a study evaluating the efficacy of an antagonist of IL-1R1 (IL-R1ra/anti-SA) in a mouse sub-chronic model of COPD induced by tobacco smoke. The results of this study revealed that the antagonists of IL-1R1 (IL-1ra/SA) was efficacious and significantly reduced the amount of inflammatory cells in lung of treated animals compared to control animals (reduced the number of total cells, macrophages, polymorphic nuclear cells, lymphocytes and eosinophils recovered in bronchioalveolar lavage (BAL)). The results indicate the administration of other antagonists of IL-1R1, such as antagonists that comprise an immunoglobulin variable domain the binds IL-1R1 and inhibits binding of a ligand (e.g., IL-1α, Il-1β) to IL-1R1, can also be administered to efficaciously treat lung inflammation, a respiratory disease or the symptoms thereof.

[0072] Antagonists of IL-1R1, such as peptide and polypeptide antagonists, can be delivered to a subject in need thereof in therapeutically effective amounts by pulmonary delivery (e.g., by inhalation). For example, as shown herein, pulmonary delivery of a dAb (HEL4) by inhalation resulted in efficient delivery of the dAb to the deep lung, as assessed by the amount of dAb recovered in BAL collected up to 24 hours after the dAb was delivered. Accordingly, as shown by the studies described herein, respiratory diseases can be treated by administering an antagonist of IL-1R1 locally to pulmonary tissue. This approach provides several advantages, such as minimizing or eliminating systemic side effects (e.g, increased incidence of infection) that have been reported to be associated with systemic administration of agents that antagonize IL-1R1, such as KINERET (e.g., anakinra, Amgen).

### Antagonists of TNFR1 for Treating, Suppressing or Preventing Lung Inflammation and Respiratory Diseases.

[0073] The invention relates to methods for treating, suppressing or preventing lung inflammation and/or a respiratory disease comprising administering to a subject (e.g., a mammal, a human) in need thereof an effective amount of an antagonist of IL-1R1. The invention also relates to the use of an antagonist of IL-1R1 for the manufacture of a medicament for treating, suppressing or preventing lung inflammation and/or respiratory disease, and to a pharmaceutical composition for treating, suppressing or preventing lung inflammation and/or respiratory disease comprising an antagonist of IL-1R1 as an active ingredient. Antagonists of TNFR1 suitable for use in the invention are described in detail herein and include small molecules, new chemical entities, IL-1ra and functional variants thereof, dAb monomers, and the like.

[0074] The invention comprises methods of administering antagonists of IL-1R1 for in in vivo therapeutic and prophylactic applications, in vivo diagnostic applications and the like. Therapeutic and prophylactic uses of antagonists of IL-1R1 comprise administering an effective amount of antagonists of IL-1R1 to a recipient mammal or subject, such as a human.

[0075] For example, the antagonists of IL-1R1 will typically find use in preventing, suppressing or treating lung inflammation and/or respiratory diseases, such as a condition in which lung inflammation is a symptom or part of the pathology, acute respiratory diseases, chronic respiratory diseases, acute inflammatory respiratory diseases and chronic inflammatory respiratory diseases. For example, the antagonists of IL-1R1 can be administered to treat, suppress or prevent lung inflammation, chronic obstructive respiratory disease (e.g., chronic bronchitis, chronic obstructive bronchitis, emphysema), asthma (e.g., steroid resistant asthma), pneumonia (e.g., bacterial pneumonia, such as Staphylococcal pneumonia), hypersensitivity pneumonitis, pulmonary infiltrate with eosinophilia, environmental lung disease, pneumonia, bronchiectasis, cystic fibrosis, interstitial lung disease, primary pulmonary hypertension, pulmonary thromboembolism, disorders of the pleura, disorders of the mediastinum, disorders of the diaphragm, hypoventilation, hyperventilation, sleep apnea, acute respiratory distress syndrome, mesothelioma, sarcoma, graft rejection, graft versus host disease, lung cancer, allergic rhinitis, allergy, asbestosis, aspergilloma, aspergillosis, bronchiectasis, chronic bronchitis, emphysema, eosinophilic pneumonia, idiopathic pulmonary fibrosis, invasive pneumococcal disease (IPD), influenza, nontuberculous mycobacteria, pleural effusion, pneumoconiosis, pneumocytosis, pneumonia, pulmonary actinomycosis, pulmonary alveolar proteinosis, pulmonary anthrax, pulmonary edema, pulmonary embolus, pulmonary inflammation, pulmonary histiocytosis X (eosinophilic granuloma), pulmonary hypertension, pulmonary nocardiosis, pulmonary tuberculosis, pulmonary veno-occlusive disease, rheumatoid lung disease, sarcoidosis, Wegener's granulomatosis, and non-small cell lung carcinoma.

[0076] In the instant application, the term “prevention” involves administration of the protective composition prior to the induction of the disease. “Suppression” refers to administration of the composition after an inductive event, but prior to the clinical appearance of the disease. “Treatment” involves administration of the protective composition after disease symptoms become manifest.

[0077] Advantageously, dual- or multi-specific ligands may be used to target IL-1R1 and other molecules in therapeutic situations in the body of an organism. The invention therefore provides a method for synergising the activity of two or more binding domains (e.g., dAbs) wherein one domain binds IL-1R1 or other target in pulmonary tissue, and the other domain binds a cytokine, receptor or other molecules, comprising administering a dual- or multi-specific ligand capable of binding to said two or more molecules (e.g., IL-1R1 and a cytokine). For example, this aspect of the invention relates to combinations of V_{H} domains and V_{L} domains, V_{H} domains only and V_{L} domains only.

[0078] Synergy in a therapeutic context may be achieved in a number of ways. For example, target combinations may be therapeutically active only if both targets are targeted by the ligand, whereas targeting one target alone is not therapeutically effective. In another embodiment, one target alone may provide some therapeutic effect, but together with a second target the combination provides a synergistic increase in therapeutic effect (more than an additive effect).

[0079] Animal model systems which can be used to screen the effectiveness of the antagonists of IL-1R1 in preventing, suppressing or treating lung inflammation or a respiratory disease are available. For example, suitable animal models of respiratory disease include models of chronic obstructive respiratory disease (see, Groneberg, D A et al., Respiratory Research 5:18 (2004)), and models of asthma (see, Coffman et al., J. Exp. Med. 201(12):1875-1879 (2001). Preferably, the antagonist of IL-1R1 is efficacious in a mouse tobacco smoke-induced model of chronic obstructive respiratory disease (e.g., the subchronic model disclosed herein) or a suitable primate model of asthma or chronic obstructive respiratory disease. More preferably, the antagonist of IL-1R1 is efficacious in a mouse tobacco smoke-induced model of chronic obstructive respiratory disease (e.g., the subchronic model disclosed herein) (See, also, Wright and Churg, Chest, 122:301-306 (2002)). For example, administering an effective amount of the ligand can reduce, delay or prevent onset of the symptoms of COPD in the model, as compared to a suitable control. The prior art does not disclose using antagonists of IL-1R1 in these models, or that they would be efficacious.

[0080] Generally, the present antagonists of IL-1R1 will be utilised in purified form together with pharmacologically appropriate carriers. Typically, these carriers include aqueous or alcoholic/aqueous solutions, emulsions or suspensions, any including saline and/or buffered media. Parenteral vehicles include sodium chloride solution, Ringer's dextrose, dextrose and sodium chloride and lactated Ringer's. Suitable physiologically-acceptable adjuvants, if necessary to keep a polypeptide complex in suspension, may be chosen from thickeners such as carboxymethylcellulose, polyvinylpyrrolidone, gelatin and alginates.

[0081] Intravenous vehicles include fluid and nutrient replenishers and electrolyte replenishers, such as those based on Ringer's dextrose. Preservatives and other additives, such as antimicrobials, antioxidants, chelating agents and inert gases, may also be present (Mack (1982) Remington's Pharmaceutical Sciences, 16th Edition). A variety of suitable formulations can be used, including extended release formulations.

[0082] The antagonists of IL-1R1 may be used as separately administered compositions or in conjunction with other agents. These can include various drugs, such as phosphodiesterase inhibitors (e.g., inhibitors of phosphodiesterase 4), bronchodilators (e.g., beta2-agonists, anticholinergerics, theophylline), short-acting beta-agonists (e.g., albuterol, salbutamol, bambuterol, fenoterol, isoetherine, isoproterenol, levalbuterol, metaproterenol, pirbuterol, terbutaline and tornlate), long-acting beta-agonists (e.g., formoterol and salmeterol), short acting anticholinergics (e.g., ipratropium bromide and oxitropium bromide), long-acting anticholinergics (e.g., tiotropium), theophylline (e.g. short acting formulation, long acting formulation), inhaled steroids (e.g., beclomethasone, beclometasone, budesonide, flunisolide, fluticasone propionate and triamcinolone), oral steroids (e.g., methylprednisolone, prednisolone, prednisolon and prednisone), combined short-acting beta-agonists with anticholinergics (e.g., albuterol/salbutamol/ipratopium, and fenoterol/ipratopium), combined long-acting beta-agonists with inhaled steroids (e.g., salmeterol/fluticasone, and formoterol/budesonide) and mucolytic agents (e.g., erdosteine, acetylcysteine, bromheksin, carbocysteine, guiafenesin and iodinated glycerol), cylcosporine, antibiotics, antivirals, methotrexate, adriamycin, cisplatinum, and immunotoxins.

[0083] Pharmaceutical compositions can include “cocktails” of various cytotoxic or other agents in conjunction with the antagonist of IL-1R1, or even combinations of antagonists of IL-1R1 having different specificities, such as antagonists of IL-1R1 (e.g., a dAb) selected using different target epitopes, whether or not they are pooled prior to administration.

[0084] The antagonists of IL-1R1 can be administered and/or formulated together with one or more additional therapeutic or active agents. When an antagonist of IL-1R1 is administered with an additional therapeutic agent, the antagonist of IL-1R1 can be administered before, simultaneously with or subsequent to administration of the additional agent. Generally, the antagonist of IL-1R1 and additional agent are administered in a manner that provides an overlap of therapeutic effect. In particular embodiments, the antagonist of IL-1R1 is administered and/or formulated together with an antagonist of TNFR1.

[0085] The compositions containing an antagonist of IL-1R1 or a cocktail thereof can be administered for prophylactic and/or therapeutic treatments. In certain therapeutic applications, an amount that is sufficient to accomplish at least partial inhibition, suppression, modulation, killing, or some other measurable parameter, of a population of selected cells is defined as a “therapeutically-effective dose”. For example, for treating lung inflammation and/or a respiratory disease, a sputum-inhibiting amount, a bronchial biopsy inflammation-inhibiting amount, a dyspnoea-inhibiting amount, a forced expiratory volume in one second (FEV (1)) increasing amount, an improvement in health status increasing amount, as quantified in a suitable questionnaire such as the St. George's Respiratory Questionnaire (e.g., an improvement score of 4 points).

[0086] Amounts needed to achieve these effects will depend upon the severity of the disease and the general state of the patient's own immune system, but generally range from 0.005 to 10.0 mg of antagonist of IL-1R1 per kilogram of body weight, with doses of 0.05 to 2.0 mg/kg/dose being more commonly used.

[0087] For prophylactic applications, compositions containing the antagonist of IL-1R1 or cocktails thereof may also be administered in similar or slightly lower dosages, to prevent, inhibit or delay onset of disease (e.g., to sustain remission or quiescence, or to prevent acute phase). The skilled clinician will be able to determine the appropriate dosing interval to treat, suppress or prevent disease. When an antagonist of IL-1R1 is administered to treat, suppress or prevent lung inflammation or a respiratory disease, it can be administered up to four times per day, twice weekly, once weekly, once every two weeks, once a month, or once every two months, at a dose off, for example, about 10 μg/kg to about 80 mg/kg, about 100 μg/kg to about 80 mg/kg, about 1 mg/kg to about 80 mg/kg, about 1 mg/kg to about 70 mg/kg, about 1 mg/kg to about 60 mg/kg, about 1 mg/kg to about 50 mg/kg, about 1 mg/kg to about 40 mg/kg, about 1 mg/kg to about 30 mg/kg, about 1 mg/kg to about 20 mg/kg, about 1 mg/kg to about 10 mg/kg, about 10 μg/kg to about 10 mg/kg, about 10 μg/kg to about 5 mg/kg, about 10 μg/kg to about 2.5 mg/kg, about 1 mg/kg, about 2 mg/kg, about 3 mg/kg, about 4 mg/kg, about 5 mg/kg, about 6 mg/kg, about 7 mg/kg, about 8 mg/kg, about 9 mg/kg or about 10 mg/kg. In particular embodiments, the antagonist of IL-1R1 is administered to treat, suppress or prevent lung inflammation or a respiratory disease each day, every two days, once a week, once every two weeks or once a month at a dose of about 10 μg/kg to about 10 mg/kg (e.g., about 10 μg/kg, about 100 μg/kg, about 1 mg/kg, about 2 mg/kg, about 3 mg/kg, about 4 mg/kg, about 5 mg/kg, about 6 mg/kg, about 7 mg/kg, about 8 mg/kg, about 9 mg/kg or about 10 mg/kg). The antagonist of IL-1R1 can also be administered to treat, suppress or prevent lung inflammation or a respiratory disease at a daily dose or unit dose of about 10 mg, about 9 mg, about 8 mg, about 7 mg, about 6 mg, about 5 mg, about 4 mg, about 3 mg, about 2 mg or about 1 mg.

[0088] Treatment or therapy performed using the antagonist of IL-1R1 described herein is considered “effective” if one or more symptoms are reduced (e.g., by at least 10% or at least one point on a clinical assessment scale), relative to such symptoms present before treatment, or relative to such symptoms in an individual (human or model animal) not treated with such composition or other suitable control. Symptoms will vary depending upon the disease or disorder targeted, but can be measured by an ordinarily skilled clinician or technician. Such symptoms can be measured, for example, by monitoring one or more physical indicators of the disease or disorder (e.g., cellular infiltrate in lung tissue, production of sputum, cellular infiltrate in sputum, dyspnoea, exercise tolerance, spirometry (e.g., forced vital capacity (FVC), force expiratory volume in one second (FEV (1), FEV (1)/FVC), rate or severity of disease exacerbation, or by an accepted clinical assessment scale, for example, the St. George's Respiratory Questionnaire. Suitable clinical assessment scales include, for example, the severity of air flow obstruction according to FEV (1) (Clinical Guideline 12, Chronic Obstructive Respiratory disease, Management of Chronic Obstructive Pulmonary Disease in Adults in Primary and Secondary Care, National Institute for Clinical Excellence, London (2004)), Peak Expiratory Flow (PEF) (British Guideline on the Management of Asthma, British Thoracic Society, Scottish Intercollegiate Guidelines Network, Revised Edition (2004)), COPD stage according to the American Thoracic Society (ATS) standard (Am. J. Respir. Crit. Care Med., 152:S77-S120 (1995), asthma impairment class according to the ATS standard (Am. Rev. Respi. Dis., 147:1056-1061 (1993), or other accepted clinical assessment scale as known in the field. A sustained (e.g., one day or more, preferably longer) reduction in disease or disorder symptoms by at least 10% or by one or more points on a given clinical scale is indicative of “effective” treatment. Similarly, prophylaxis performed using a composition as described herein is “effective” if the onset or severity of one or more symptoms is delayed, reduced or abolished relative to such symptoms in a similar individual (human or animal model) not treated with the composition.

[0089] A composition containing an antagonist of IL-1R1 according to the present invention may be utilised in prophylactic and therapeutic settings to aid in the alteration, inactivation, killing or removal of a select target cell population in a mammal. For example, such compositions can be used to reduce levels of inflammatory cells in lung and/or inhibit cell infiltration of the lung.

[0090] The antagonists of IL-1R1 can be lyophilised for storage and reconstituted in a suitable carrier prior to use. This technique has been shown to be effective with conventional immunoglobulins and art-known lyophilisation and reconstitution techniques can be employed. It will be appreciated by those skilled in the art that lyophilisation and reconstitution can lead to varying degrees of antibody activity loss (e.g. with conventional immunoglobulins, IgM antibodies tend to have greater activity loss than IgG antibodies) and that use levels may have to be adjusted upward to compensate. The antagonist of IL-1R1 can be lyophilised to form a dry powder for inhalation, and administered in that form.

[0091] The route of administration of pharmaceutical compositions according to the invention may be any of those commonly known to those of ordinary skill in the art. The administration can be by any appropriate mode, including parenterally, intravenously, intramuscularly, intraperitoneally, transdermally, via the pulmonary route, or by direct infusion with a catheter. The dosage and frequency of administration will depend on the age, sex and condition of the patient, concurrent administration of other drugs, counterindications and other parameters to be taken into account by the clinician. Administration can be local (e.g., local delivery to the lung by pulmonary administration, e.g., intranasal administration) or systemic as indicated.

[0092] In particular embodiments, an antagonist of IL-1R1 is administered via pulmonary delivery, such as by inhalation (e.g., intrabronchial, intranasal or oral inhalation, intranasal drops) or by systemic delivery (e.g., parenteral, intravenous, intramuscular, intraperitoneal, subcutaneous). In preferred embodiments, the antagonist of IL-1R1 is administered to a subject via pulmonary administration, such as inhalation or intranasal administration (e.g., intrabronchial, intranasal or oral inhalation, intranasal drops). For inhalation, the antagonist of IL-1R1 can be administered with the use of a nebulizer, inhaler, atomizer, aerosolizer, mister, dry powder inhaler, metered dose inhaler, metered dose sprayer, metered dose mister, metered dose atomizer, or other suitable delivery device.

[0093] The invention relates to a method for treating, suppressing or preventing lung inflammation or a respiratory disease, comprising administering to a subject in need thereof an effective amount of an antagonist of IL-1R1. In some embodiments, the effective amount administered does not exceed about 10 mg/kg/day, and preferably the level of inflammatory cells in the lung is reduced relative to pretreatment levels, or recruitment of inflammatory cells into the lung is inhibited relative to pretreatment levels. The level of inflammatory cells in the lung or recruitment of inflammatory cells into the lung can be reduced or inhibited relative to pretreatment levels by at least about 30%, at least about 40%, at least about 50%, at least about 60%, at least about 70%, at least about 80%, at least about 90%, or at least about 95%.

[0094] The level of inflammatory cells in the lung or recruitment of inflammatory cells into the lung can be reduced or inhibited relative to pretreatment levels with p<0.05 or p<0.001, in some embodiments. Preferably, statistical analysis and significance is determined using the methods described herein.

[0095] Levels of cells (e.g., inflammatory cells) in the lung can be assessed using any suitable method, such as total or differential cell counts (e.g., macrophage cell count, neutrophil cell count, eosinophil cell count, lymphocyte cell count, epithelial cell count) in BAL, sputum or biopsy (e.g., bronchial biopsy, lung biopsy).

[0096] In some embodiments, the methods described herein are employed for treating, suppressing or preventing chronic obstructive respiratory disease (e.g., chronic bronchitis, chronic obstructive bronchitis, emphysema), asthma (e.g., steroid resistant asthma), pneumonia (e.g., bacterial pneumonia, such as Staphylococcal pneumonia), or lung inflammation.

[0097] The invention also relates to the use of an antagonist of IL-1R1, as described herein, for the manufacture of a medicament or formulation for treating lung inflammation or a respiratory disease described herein. The medicament can be for systemic administration and/or local administration to pulmonary tissue.

[0098] The invention provides methods of treating a respiratory disease in which a therapeutically effective amount of an antagonist of IL-1R1 (e.g., IL-1ra, dAb, ligand) is administered systemically to a subject in need. In some embodiments, the method further comprises administering a therapeutically effective amount of an antagonist of TNFR1 to the subject. The antagonist of TNFR1 can be administered by any suitable method, such as by pulmonary administration or systemic administration.

### Antagonists of IL-1R1

[0099] Antagonists of IL-1R1 suitable for use in the invention include, for example, small molecules, proteins, polypeptides (e.g., fusion proteins), peptides and conjugates that bind IL-1R1 and inhibit a function of IL-1R1 (e.g., binding of IL-1α and/or IL-1β; inhibit signaling upon binding of IL-1α and/or IL-1β). As described herein, an antagonist of IL-1R1 suitable for use in the invention comprise an antagonist of IL-1R1 moiety, that can be formatted into a variety of suitable structures. For example, antagonists of IL-1R1 include proteins or polypeptides that comprise IL-1ra or functional variants of IL-1 ra, and proteins, polypeptides and peptides that comprise a binding domain that has a binding site with binding specificity for IL-1R1 and inhibits a function of IL-1R1. Preferably, the binding domain that has a binding site with binding specificity for IL1-R1 and inhibits a function of IL-1R1 is an antibody that bind IL-1R1 or an antigen-binding fragment thereof, such as, Fab fragment, Fab′ fragment, F(ab′)₂ fragment, Fv fragment (e.g., single chain Fv (scFv), disulfide bonded Fv fragment), domain antibody (dAbs; single V_{H}, single V_{κ}, single V_{λ}), Camelid V_{HH} and the like. The binding domain can comprises one or more complementarity determining regions (CDRs) of an immunoglobulin single variable domain that has binding specificity for IL-1R1 in a suitable format, such that the binding domain has binding specificity for IL-1R1. For example, the CDRs can be grafted onto a suitable protein scaffold or skeleton, such as an affibody, an SpA scaffold, an LDL receptor class A domain, or an EGF domain. The binding domain can also be a protein domain comprising a binding site for IL-1R1, e.g., a protein domain is selected from an affibody, an SpA domain, an LDL receptor class A domain an EGF domain, an avimer (see, e.g., U.S. Patent Application Publication Nos. 2005/0053973, 2005/0089932, 2005/0164301).

[0100] In some embodiments, the antagonist of IL-1R1 comprises a non-immunoglobulin binding moiety that has binding specificity for IL-1R1 and inhibits a function of IL-1R1, wherein the non-immunoglobulin binding moiety comprises one, two or three of the CDRs of a V_{H}, V_{L} or V_{HH} that binds IL-1R1 and a suitable scaffold. In certain embodiments, the non-immunoglobulin binding moiety comprises CDR3 but not CDR1 or CDR2 of a V_{H}, V_{L} or V_{HH} that binds IL-1R1 and a suitable scaffold. In other embodiments, the non-immunoglobulin binding moiety comprises CDR1 and CDR2, but not CDR3 of a V_{H}, V_{L} or V_{HH} that binds IL-1R1 and a suitable scaffold. In other embodiments, the non-immunoglobulin binding moiety comprises CDR1, CDR2 and CDR3 of a V_{H}, V_{L} or V_{HH} that binds IL-1R1 and a suitable scaffold. In other embodiments, the antagonist of IL-1R1 comprises only CDR3 of a V_{H}, V_{L} or V_{HH} that binds IL-1R1. Preferably, the CDR or CDRs of the antagonist of IL-1R1 of these embodiments is a CDR or CDRs of a V_{H}, or V_{L} that binds IL-1R1 described herein.

[0101] Suitable antagonists of IL-1R1 for use in the invention also include conjugates, such as a covalent antagonist of IL-1R1 conjugates, and a noncovalent antagonists of IL-1R1 conjugates, and fusion proteins, such as, an antagonist of IL-1R1 fusion, as defined herein. For example, the antagonist of IL-1R1 can be a fusion protein that that comprise IL-1ra, a functional variant of IL-1ra, an antibody that bind IL-1R1, an antigen-binding fragment of an antibody that binds IL-1R1 (e.g., a dAb), and/or a non-immunoglobulin binding moiety that has binding specificity for IL-1R1.

[0102] Preferred antagonists of IL-1R1 are polypeptides that comprise IL-1ra or functional variants of IL-1ra, and polypeptides that comprise a dAb that binds IL-1R1 and inhibits a function of IL-1R1.

Antibodies and Antibody Portions that Bind IL-1R1

[0103] The antagonist of IL-1R1 can comprise an (i.e., one or more) antibody or antigen-binding fragment of an antibody that binds IL-1R1 and inhibits function of IL-1R1. For example, the antibody or antigen-binding fragment thereof can bind IL-1R1 and inhibiting binding of a ligand (e.g., IL-1α, IL-1β, IL-1ra, or any combination of the foregoing) to the receptor, or inhibit IL-1R1 mediated signaling upon binding of a ligand (e.g., IL-1α, IL-1β). The antibody or antigen-binding fragment can have binding specificity for IL-1R1 of an animal to which the antagonist of IL-1R1 will be administered. Preferably, the antibody or antigen-binding fragment has binding specificity for human IL-1R1. However, veterinary applications are contemplated and the antibody or antigen-binding fragment can have binding specificity for IL-1R1 from a desired animal, for example IL-1R1 from dog, cat, horse, cow, chicken, sheep, pig, goat, deer, mink, and the like. In some embodiments, the antibody or antigen-binding fragment has binding specificity for IL-1R1 from more than one species. Such antibodies or antigen-binding fragment provide the advantage of allowing preclinical and clinical studies to be designed and executed using the same antagonist of IL-1R1, and obviate the need to conduct preclinical studies with a suitable surrogate antagonist of IL-1R1.

[0104] Antibodies and antigen-binding fragments thereof which bind a desired IL-1R1 (e.g., human IL-1R1) can be selected from a suitable collection of natural or artificial antibodies or raised against an appropriate immunogen in a suitable host. For example, antibodies can be raised by immunizing a suitable host (e.g., mouse, human antibody-transgenic mouse, rat, rabbit, chicken, goat, non-human primate (e.g., monkey)) with IL-1R1 (e.g., isolated or purified human IL-1R1) or a peptide of IL-1R1 (e.g., a peptide comprising at least about 8, 9, 10, 11, 12, 15, 20, 25, 30, 33, 35, 37, or 40 amino acid residues). Antibodies and antigen-binding fragments that bind IL-1R1 can also be selected from a library of recombinant antibodies or antigen-binding fragments, such as a phage display library. Such libraries can contain antibodies or antigen-binding fragments of antibodies that contain natural or artificial amino acid sequences. For example, the library can contain Fab fragments which contain artificial CDRs (e.g., random amino acid sequences) and human framework regions. (See, for example, U.S. Pat. No. 6,300,064 (Knappik, et al.).) In other examples, the library contains scFv fragments or dAbs (single V_{H}, single V_{κ} or single V_{λ}) with sequence diversity in one or more CDRs. (See, e.g., WO 99/20749 (Tomlinson and Winter), WO 03/002609 A2 (Winter et al.), WO 2004/003019A2 (Winter et al.).)

[0105] Antigen-binding fragments of antibodies that are suitable for use in the invention include, for example, Fab fragments, Fab′ fragments, F(ab′)₂ fragments, Fv fragments (including single chain Fv (scFv) and disulfide bonded Fv), a single variable domain (V_{H}, V_{L}, V_{HH}). Such antigen-binding fragments can be produced using any suitable method, such as by proteolysis of an antibody using pepsin, papain or other protease having the requisite cleavage specificity, or using recombinant techniques. For example, Fv fragments can be prepared by digesting an antibody with a suitable protease or using recombinant DNA technology. For example, a nucleic acid can be prepared that encodes a light chain variable region and heavy chain variable region that are connected by a suitable peptide linker, such as a chain of two to about twenty Glycyl residues or (Gly₄Ser)ₙ, where n=from 1 to 8, e.g., 1, 2, 3, 4, 5, 6, 7 or 8. The nucleic acid can be introduced into a suitable host (e.g., E. coli) using any suitable technique (e.g., transfection, transformation, infection), and the host can be maintained under conditions suitable for expression of a single chain Fv fragment. A variety of antigen-binding fragments of antibodies can be prepared using antibody genes in which one or more stop codons have been introduced upstream of the natural stop site. For example, an expression construct encoding a F(ab′)₂ portion of an immunoglobulin heavy chain can be designed by introducing a translation stop codon at the 3′ end of the sequence encoding the hinge region of the heavy chain. The antagonist of IL-1R1 can comprise the individual heavy and light chains of antibodies that bind IL-1R1 or portions of the individual chains that bind IL-1R1 (e.g., a single V_{H}, V_{κ} or V_{λ}).

[0106] Suitable antibodies and antigen-binding fragments thereof that bind IL-1R1 include, for example, human antibodies and antigen-binding fragments thereof, humanized antibodies and antigen-binding fragments thereof, chimeric antibodies and antigen-binding fragments thereof, rodent (e.g., mouse, rat) antibodies and antigen-binding fragments thereof, and Camelid antibodies and antigen-binding fragments thereof. In certain embodiments, the antagonist of IL-1R1 comprises a Camelid V_{HH} that binds IL-1R1. Camelid V_{HH}s are immunoglobulin single variable domain polypeptides which are derived from heavy chain antibodies that are naturally devoid of light chains. Such antibodies occur in Camelid species including camel, llama, alpaca, dromedary, and guanaco. V_{HH} molecules are about ten times smaller than IgG molecules, and as single polypeptides, are very stable and resistant to extreme pH and temperature conditions.

[0107] If antibodies are prepared by immunization, preparation of the immunizing antigen, and polyclonal and monoclonal antibody production can be performed using any suitable technique. A variety of methods have been described. (See, e.g., Kohler et al., Nature, 256: 495-497 (1975) and Eur. J. Immunol. 6: 511-519 (1976); Milstein et al., Nature 266: 550-552 (1977); Koprowski et al., U.S. Pat. No. 4,172,124; Harlow, E. and D. Lane, 1988, Antibodies: A Laboratory Manual, (Cold Spring Harbor Laboratory: Cold Spring Harbor, N.Y.); Current Protocols In Molecular Biology, Vol. 2 (Supplement 27, Summer '94), Ausubel, F. M. et al., Eds., (John Wiley & Sons: New York, N.Y.), Chapter 11, (1991).) When a monoclonal antibody is desired, a hybridoma can be produced by fusing suitable cells from an immortal cell line (e.g., a myeloma cell line such as SP2/0, P3X63Ag8.653 or a heteromyeloma) with antibody-producing cells. Antibody-producing cells can be obtained from the peripheral blood or, preferably the spleen or lymph nodes, of humans, human-antibody transgenic animals or other suitable animals immunized with the antigen of interest. Cells that produce antibodies of human origin (e.g., a human antibody) can be produced using suitable methods, for example, fusion of a human antibody-producing cell and a heteromyeloma or trioma, or immortalization of an activated human B cell via infection with Epstein Barr virus. (See, e.g., U.S. Pat. No. 6,197,582 (Trakht); Niedbala et al., Hybridoma, 17:299-304 (1998); Zanella et al., J Immunol Methods, 156:205-215 (1992); Gustafsson et al., Hum Antibodies Hybridomas, 2:26-32 (1991).) The fused or immortalized antibody-producing cells (hybridomas) can be isolated using selective culture conditions, and cloned by limiting dilution. Cells which produce antibodies with the desired specificity can be identified using a suitable assay (e.g., ELISA).

[0108] Antibodies also can be prepared directly (e.g., synthesized or cloned) from an isolated antigen-specific antibody producing cell (e.g., a cell from the peripheral blood or, preferably the spleen or lymph nodes determined to produce an antibody with desired specificity), of humans, human-antibody transgenic animals or other suitable animals immunized with the antigen of interest (see, e.g., U.S. Pat. No. 5,627,052 (Schrader)).

[0109] When the antagonist of IL-1R1 is for administration to a human, any antibody or antigen-binding fragment of an antibody that is part of the antagonists of IL-1R1 (e.g., an antibody or antigen-binding fragment thereof that binds IL-1R1 (e.g., human IL-1R1) or serum albumin (e.g., human serum albumin)) can be a human, humanized or chimeric antibody or an antigen-binding fragment of such an antibody. These types of antibodies and antigen-binding fragments are less immunogenic or non-immunogenic in humans and provide well-known advantages. For example, antagonists of IL-1R1 that comprise an antigen-binding fragment of a human, humanized or chimeric antibody can be administered repeatedly to a human with less or no loss of efficacy (compared with other fully immunogenic antibodies) due to the elaboration of human antibodies that bind to the antagonist of IL-1R1. When the antagonist of IL-1R1 is intended for veterinary administration, analogous antibodies or antigen-binding fragments can be used. For example, CDRs from a murine or human antibody can be grafted onto framework regions from a desired animal, such as a horse or cow.

[0110] Human antibodies and nucleic acids encoding same can be obtained, for example, from a human or from human-antibody transgenic animals. Human-antibody transgenic animals (e.g., mice) are animals that are capable of producing a repertoire of human antibodies, such as XENOMOUSE (Abgenix, Fremont, Calif.), HUMAB-MOUSE, KIRIN TC MOUSE or KM-MOUSE (MEDAREX, Princeton, N.J.). Generally, the genome of human-antibody transgenic animals has been altered to include a transgene comprising DNA from a human immunoglobulin locus that can undergo functional rearrangement. An endogenous immunoglobulin locus in a human-antibody transgenic animal can be disrupted or deleted to eliminate the capacity of the animal to produce antibodies encoded by an endogenous gene. Suitable methods for producing human-antibody transgenic animals are well known in the art. (See, for example, U.S. Pat. Nos. 5,939,598 and 6,075,181 (Kucherlapati et al.), U.S. Pat. Nos. 5,569,825, 5,545,806, 5,625,126, 5,633,425, 5,661,016, and 5,789,650 (Lonberg et al.), Jakobovits et al., Proc. Natl. Acad. Sci. USA, 90: 2551-2555 (1993), Jakobovits et al., Nature, 362: 255-258 (1993), Jakobovits et al. WO 98/50433, Jakobovits et al. WO 98/24893, Lonberg et al. WO 98/24884, Lonberg et al. WO 97/13852, Lonberg et al. WO 94/25585, Lonberg et al. EP 0 814 259 A2, Lonberg et al. GB 2 272 440 A, Lonberg et al., Nature 368:856-859 (1994), Lonberg et al., Int Rev Immunol 13(1):65-93 (1995), Kucherlapati et al. WO 96/34096, Kucherlapati et al. EP 0 463 151 B1, Kucherlapati et al. EP 0 710 719 A1, Surani et al. U.S. Pat. No. 5,545,807, Bruggemann et al. WO 90/04036, Bruggemann et al. EP 0 438 474 B1, Taylor et al., Int. Immunol. 6(4)579-591 (1994), Taylor et al., Nucleic Acids Research 20(23):6287-6295 (1992), Green et al., Nature Genetics 7:13-21 (1994), Mendez et al., Nature Genetics 15:146-156 (1997), Tuaillon et al., Proc Natl Acad Sci USA 90(8):3720-3724 (1993) and Fishwild et al., Nat Biotechnol 14(7):845-851 (1996), the teachings of each of the foregoing are incorporated herein by reference in their entirety.) Human-antibody transgenic animals can be immunized with a suitable antigen (e.g., human IL-1R1), and antibody producing cells can be isolated and fused to form hybridomas using conventional methods. Hybridomas that produce human antibodies having the desired characteristics (e.g., specificity, affinity) can be identified using any suitable assay (e.g., ELISA) and, if desired, selected and subcloned using suitable culture techniques.

[0111] Humanized antibodies and other CDR-grafted antibodies can be prepared using any suitable method. The CDRs of a CDR-grafted antibody can be derived from a suitable antibody which binds a serum albumin (referred to as a donor antibody). Other sources of suitable CDRs include natural and artificial serum albumin-specific antibodies obtained from human or nonhuman sources, such as rodent (e.g., mouse, rat, rabbit), chicken, pig, goat, non-human primate (e.g., monkey) or a library.

[0112] The framework regions of a humanized antibody are preferably of human origin, and can be derived from any human antibody variable region having sequence similarity to the analogous or equivalent region (e.g., heavy chain variable region or light chain variable region) of the antigen-binding region of the donor antibody. Other sources of framework regions of human origin include human variable region consensus sequences. (See, e.g., Kettleborough, C. A. et al., Protein Engineering 4:773-783 (1991); Carter et al., WO 94/04679; Kabat, E. A., et al., Sequences of Proteins of Immunological Interest, Fifth Edition, U.S. Department of Health and Human Services, U.S. Government Printing Office (1991)). Other types of CDR grafted antibodies can contain framework regions of suitable origin, such as framework regions encoded by germline antibody gene segments from horse, cow, dog, cat and the like.

[0113] Framework regions of human origin can include amino acid substitutions or replacements, such as “back mutations” which replace an amino acid residue in the framework region of human or animal origin with a residue from the corresponding position of the donor antibody. One or more mutations in the framework region can be made, including deletions, insertions and substitutions of one or more amino acids. Variants can be produced by a variety of suitable methods, including mutagenesis of nonhuman donor or acceptor human chains. (See, e.g., U.S. Pat. Nos. 5,693,762 (Queen et al.) and 5,859,205 (Adair et al.), the entire teachings of which are incorporated herein by reference.)

[0114] Constant regions of antibodies, antibody chains (e.g., heavy chain, light chain) or fragments or portions thereof, if present, can be derived from any suitable source. For example, constant regions of human, humanized and certain chimeric antibodies, antibody chains (e.g., heavy chain, light chain) or fragments or portions thereof, if present can be of human origin and can be derived from any suitable human antibody or antibody chain. For example, a constant region of human origin or portion thereof can be derived from a human κ or λ light chain, and/or a human γ (e.g., γ1, γ2, γ3, γ4), Ξ, α (e.g., α1, α2), δ or ε heavy chain, including allelic variants. In certain embodiments, the antibody or antigen-binding fragment (e.g., antibody of human origin, human antibody) can include amino acid substitutions or replacements that alter or tailor function (e.g., effector function). For example, a constant region of human origin (e.g., γ1 constant region, γ2 constant region) can be designed to reduce complement activation and/or Fc receptor binding. (See, for example, U.S. Pat. Nos. 5,648,260 (Winter et al.), 5,624,821 (Winter et al.) and 5,834,597 (Tso et al.), the entire teachings of which are incorporated herein by reference.) Preferably, the amino acid sequence of a constant region of human origin that contains such amino acid substitutions or replacements is at least about 95% identical over the full length to the amino acid sequence of the unaltered constant region of human origin, more preferably at least about 99% identical over the full length to the amino acid sequence of the unaltered constant region of human origin.

[0115] Humanized antibodies, CDR grafted antibodies or antigen-binding fragments of a humanized or CDR grafted antibody can be prepared using any suitable method. Several such methods are well-known in the art. (See, e.g., U.S. Pat. No. 5,225,539 (Winter), U.S. Pat. No. 5,530,101 (Queen et al.).) The portions of a humanized or CDR grafted antibody (e.g., CDRs, framework, constant region) can be obtained or derived directly from suitable antibodies (e.g., by de novo synthesis of a portion), or nucleic acids encoding an antibody or chain thereof having the desired property (e.g., binds serum albumin) can be produced and expressed. To prepare a portion of a chain, one or more stop codons can be introduced at the desired position. For example, nucleic acid (e.g., DNA) sequences coding for humanized or CDR grafted variable regions can be constructed using PCR mutagenesis methods to alter existing DNA sequences. (See, e.g., Kamman, M., et al., Nucl. Acids Res. 17:5404 (1989).) PCR primers coding for the new CDRs can be hybridized to a DNA template of a previously humanized variable region which is based on the same, or a very similar, human variable region (Sato, K., et al., Cancer Research 53:851-856 (1993)). If a similar DNA sequence is not available for use as a template, a nucleic acid comprising a sequence encoding a variable region sequence can be constructed from synthetic oligonucleotides (see e.g., Kolbinger, F., Protein Engineering 8:971-980 (1993)). A sequence encoding a signal peptide can also be incorporated into the nucleic acid (e.g., on synthesis, upon insertion into a vector). The natural signal peptide sequence from the acceptor antibody, a signal peptide sequence from another antibody or other suitable sequence can be used (see, e.g., Kettleborough, C. A., Protein Engineering 4:773-783 (1991)). Using these methods or other suitable methods, variants can be readily produced. In one embodiment, cloned variable regions can be mutated, and sequences encoding variants with the desired specificity can be selected (e.g., from a phage library; see, e.g., U.S. Pat. No. 5,514,548 (Krebber et al.) and WO 93/06213 (Hoogenboom et al.)).

[0116] The antibody or antigen-binding fragment that binds IL-1R1 can be a chimeric antibody or an antigen-binding fragment of a chimeric antibody. The chimeric antibody or antigen-binding fragment thereof comprises a variable region from one species (e.g., mouse) and at least a portion of a constant region from another species (e.g., human). Chimeric antibodies and antigen-binding fragments of chimeric antibodies can be prepared using any suitable method. Several suitable methods are well-known in the art. (See, e.g., U.S. Pat. No. 4,816,567 (Cabilly et al.), U.S. Pat. No. 5,116,946 (Capon et al.).)

[0117] A preferred method for obtaining antigen-binding fragments of antibodies that bind IL-1R1 comprises selecting an antigen-binding fragment (e.g., scFvs, dAbs) that has binding specificity for a desired IL-1R1 from a repertoire of antigen-binding fragments. For example, dAbs that bind IL-1R1 can be selected from a suitable phage display library. A number of suitable bacteriophage display libraries and selection methods (e.g., monovalent display and multivalent display systems) have been described. (See, e.g., Griffiths et al., U.S. Pat. No. 6,555,313 B1 (incorporated herein by reference); Johnson et al., U.S. Pat. No. 5,733,743 (incorporated herein by reference); McCafferty et al., U.S. Pat. No. 5,969,108 (incorporated herein by reference); Mulligan-Kehoe, U.S. Pat. No. 5,702,892 (incorporated herein by reference); Winter, G. et al., Annu. Rev. Immunol. 12:433-455 (1994); Soumillion, P. et al., Appl. Biochem. Biotechnol. 47(2-3):175-189 (1994); Castagnoli, L. et al., Comb. Chem. High Throughput Screen, 4(2):121-133 (2001); WO 99/20749 (Tomlinson and Winter); WO 03/002609 A2 (Winter et al.); WO 2004/003019A2 (Winter et al.).) The polypeptides displayed in a bacteriophage library can be displayed on any suitable bacteriophage, such as a filamentous phage (e.g., fd, M13, F1), a lytic phage (e.g., T4, T7, lambda), or an RNA phage (e.g., MS2), for example, and selected for binding to IL-1R1 (e.g., human IL-1R1).

[0118] Generally, a library of phage that displays a repertoire of polypeptides as fusion proteins with a suitable phage coat protein is used. Such a library can be produced using any suitable methods, such as introducing a library of phage vectors or phagemid vectors encoding the displayed antibodies or antigen-binding fragments thereof into suitable host bacteria, and culturing the resulting bacteria to produce phage (e.g., using a suitable helper phage or complementing plasmid if desired). The library of phage can be recovered from such a culture using any suitable method, such as precipitation and centrifugation.

[0119] The library can comprise a repertoire of antibodies or antigen-binding fragments thereof that contains any desired amount of amino acid sequence diversity. For example, the repertoire can contain antibodies or antigen-binding fragments thereof that have amino acid sequences that correspond to naturally occurring antibodies from a desired organism, and/or can contain one or more regions of random or randomized amino acid sequences (e.g., CDR sequences). The antibodies or antigen-binding fragments thereof in such a repertoire or library can comprise defined regions of random or randomized amino acid sequence and regions of common amino acid sequence. In certain embodiments, all or substantially all polypeptides in a repertoire are a desired type of antigen-binding fragment of an antibody (e.g., human V_{H} or human V_{L}). For example, each polypeptide in the repertoire can contain a V_{H}, a V_{L} or an Fv (e.g., a single chain Fv).

[0120] Amino acid sequence diversity can be introduced into any desired region of antibodies or antigen-binding fragments thereof using any suitable method. For example, amino acid sequence diversity can be introduced into a target region, such as a complementarity determining region of an antibody variable domain, by preparing a library of nucleic acids that encode the diversified antibodies or antigen-binding fragments thereof using any suitable mutagenesis methods (e.g., low fidelity PCR, oligonucleotide-mediated or site directed mutagenesis, diversification using NNK codons) or any other suitable method. If desired, a region of the antibodies or antigen-binding fragments thereof to be diversified can be randomized.

[0121] A suitable phage display library can be used to select antibodies or antigen-binding fragments of antibodies that bind IL-1R1, inhibit IL-1R1 function and have other beneficial properties. For example, antibodies or antigen-binding fragments that resist aggregation when unfolded can be selected. Aggregation is influenced by polypeptide concentration and is thought to arise in many cases from partially folded or unfolded intermediates. Factors and conditions that favor partially folded intermediates, such as elevated temperature and high polypeptide concentration, promote irreversible aggregation. (Fink, A. L., Folding & Design 3:R1-R23 (1998).)

[0122] For example, storing purified polypeptides in concentrated form, such as a lyophilized preparation, frequently results in irreversible aggregation of at least a portion of the polypeptides. Also, production of a polypeptide by expression in biological systems, such as E. coli, often results in the formation of inclusion bodies which contain aggregated polypeptides. Recovering active polypeptides from inclusion bodies can be very difficult and require adding additional steps, such as a refolding step, to a biological production system.

[0123] Antibodies and antigen-binding fragments that resist aggregation and unfold reversibly when heated can be selected from a suitable phage display library. Generally, a phage display library comprising a repertoire of displayed antibodies or antigen-binding fragments thereof is heated to a temperature (Ts) at which at least a portion of the displayed antibodies or antigen-binding fragments thereof are unfolded, then cooled to a temperature (Tc) wherein Ts>Tc, whereby at least a portion of the antibodies or antigen-binding fragments thereof have refolded and a portion of the polypeptides have aggregated. Then, antibodies or antigen-binding fragments thereof that unfold reversibly and bind serum albumin are recovered at a temperature (Tr). The recovered antibody or antigen-binding fragment thereof that unfolds reversibly has a melting temperature (Tm), and preferably, the repertoire was heated to Ts, cooled to Tc and the antibody or antigen-binding fragment thereof that unfolds reversibly was isolated at Tr, such that Ts>Tm>Tc, and Ts>Tm>Tr. Generally, the phage display library is heated to about 80° C. and cooled to about room temperature or about 4° C. before selection. Antibodies or antigen-binding fragment thereof that unfold reversibly and resist aggregation can also be designed or engineered by replacing certain amino acid residue with residues that confer the ability to unfold reversibly. (See, WO 2004/101790 (Jespers et al.), and U.S. Provisional Patent Application Nos. 60/470,340 (filed on May 14, 2003) and 60/554,021 (filed on Mar. 17, 2004) for detailed discussion of methods for selecting and for designing or engineering antibodies or antigen-binding fragments thereof that unfold reversibly. The teachings of WO 2004/101790 and both of the foregoing U.S. Provisional Patent Applications are incorporated herein by reference.)

[0124] Antibodies or antigen-binding fragments thereof that unfold reversibly and resist aggregation provide several advantages. For example, due to their resistance to aggregation, antibodies or antigen-binding fragments thereof that unfold reversibly can readily be produced in high yield as soluble proteins by expression using a suitable biological production system, such as E. coli. In addition, antibodies or antigen-binding fragments thereof that unfold reversibly can be formulated and/or stored at higher concentrations than conventional polypeptides, and with less aggregation and loss of activity. For example, dAb HEL4 is a human V_{H} that binds hen egg lysozyme and unfolds reversibly, and DOM7h-26 (SEQ ID NO: 743) is a human V_{H} that binds serum albumin and unfolds reversibly.

[0125] Preferably, the antibody or antigen-binding fragment thereof that binds IL-1R1 comprises a variable domain (V_{H}, V_{κ}, V_{λ}) in which one or more of the framework regions (FR) comprise (a) the amino acid sequence of a human framework region, (b) at least 8 contiguous amino acids of the amino acid sequence of a human framework region, or (c) an amino acid sequence encoded by a human germline antibody gene segment, wherein said framework regions are as defined by Kabat. In certain embodiments, the amino acid sequence of one or more of the framework regions is the same as the amino acid sequence of a corresponding framework region encoded by a human germline antibody gene segment, or the amino acid sequences of one or more of said framework regions collectively comprise up to 5 amino acid differences relative to the amino acid sequence of said corresponding framework region encoded by a human germline antibody gene segment.

[0126] In other embodiments, the amino acid sequences of FR1, FR2, FR3 and FR4 are the same as the amino acid sequences of corresponding framework regions encoded by a human germline antibody gene segment, or the amino acid sequences of FR1, FR2, FR3 and FR4 collectively contain up to 10 amino acid differences relative to the amino acid sequences of corresponding framework regions encoded by said human germline antibody gene segments. In other embodiments, the amino acid sequence of said FR1, FR2 and FR3 are the same as the amino acid sequences of corresponding framework regions encoded by said human germline antibody gene segment.

[0127] In particular embodiments, the antibody or antigen binding fragment that binds IL-1R1 comprises an immunoglobulin variable domain (e.g., V_{H}, V_{L}) based on a human germline sequence, and if desired can have one or more diversified regions, such as the complementarity determining regions. Suitable human germline sequence for V_{H} include, for example, sequences encoded by the V_{H} gene segments DP4, DP7, DP8, DP9, DP10, DP31, DP33, DP45, DP46, DP47, DP49, DP50, DP51, DP53, DP54, DP65, DP66, DP67, DP68 and DP69, and the J_{H} segments JH1, JH2, JH3, JH4, JH4b, JH5 and JH6. Any of the foregoing V_{H} gene segments can be paired with any of the foregoing J_{H} segments. Suitable human germline sequence for V_{L} include, for example, sequences encoded by the V_{κ} gene segments DPK1, DPK2, DPK3, DPK4, DPK5, DPK6, DPK7, DPK8, DPK9, DPK10, DPK12, DPK13, DPK15, DPK16, DPK18, DPK19, DPK20, DPK21, DPK22, DPK23, DPK24, DPK25, DPK26 and DPK28, and the J_{κ} segments J_{κ} 1, J_{κ} 2, J_{κ} 3, J_{κ} 4 and J_{κ} 5. Any of the foregoing V_{L} gene segments can be paired with any of the foregoing J_{κ} segments.

[0128] The antibody or antigen-binding fragment that bind IL-1R1 can bind IL-1R1 with any desired affinity, and antibodies and antigen-binding fragments with a desired affinity can be readily identified using any suitable screening method. The antibody or antigen-binding fragment that binds IL-1R1 (e.g., dAb) generally binds with a KD (KD=K_{off} (kd)/Kₒₙ (ka)) of about KD of 300 nM to 5 pM (ie, 3×10⁻⁷ to 5×10⁻¹² M), preferably 50 nM to 20 pM, more preferably 5 nM to 200 pM and most preferably 1 nM to 100 pM, for example 1×10⁻⁷ M or less, preferably 1×10⁻⁸ M or less, more preferably 1×10⁻⁹ M or less, advantageously 1×10⁻¹⁰ M or less and most preferably 1×10⁻¹¹ M or less; and/or a K_{off} rate constant of 5×10⁻¹ s⁻¹ to 1×10⁻⁷ s⁻¹ preferably 1×10⁻² s⁻¹ to 1×10⁻⁶ s⁻¹, more preferably 5×10⁻³ s⁻¹ to 1×10⁻⁵ s⁻¹, for example 5×10⁻¹ s⁻¹ or less, preferably 1×10⁻² s⁻¹ or less, advantageously 1×10⁻³ s⁻¹ or less, more preferably 1×10⁻⁴ s⁻¹ or less, still more preferably 1×10⁻⁵ s⁻¹ or less, and most preferably 1×10⁻⁶ s⁻¹ or less as determined by surface plasmon resonance. Certain antibody or antigen-binding fragment that bind IL-1R1, specifically bind human IL-1R1 with a KD of 50 nM to 20 pM, and a K_{off} rate constant of 5×10⁻¹ s⁻¹ to 1×10⁻⁷ s⁻¹, as determined by surface plasmon resonance.

[0129] Preferably, the antibody or antigen-binding fragment that bind IL-1R1 inhibits binding of IL-1a and/or IL-1β to IL-1R1 with an inhibitory concentration 50 (IC50) that is ≦10 μM, ≦1 μM, ≦100 nM, ≦10 nM, ≦1 nM, ≦500 pM, ≦300 pM, ≦100 pM, or ≦10 pM. The IC50 is preferably determined using an in vitro receptor binding assay, such as the assay described herein.

[0130] It is also preferred that the antibody or antigen-binding fragment that bind IL-1R1 inhibits IL-1\ddot{□} and/or IL-1□-induced functions in a suitable in vitro assay with a neutralizing dose 50 (ND50) that is ≦10 □M, ≦1 □M, ≦100 nM, ≦10 nM, 1 nM, ≦500 pM, ≦300 pM, ≦100 pM, or ≦10 pM. For example, the antibody or antigen-binding fragment that bind IL-1R1 can inhibit IL-1□- or IL-1□-induced release of Interleukin-8 by MRC-5 cells (ATCC Accession No. CCL-171) in an in vitro assay, such as the assay described herein. In another example, the antibody or antigen-binding fragment that bind IL-1R1 can inhibit IL-1□- or IL-1□-induced release of Interleukin-6 in a whole blood assay, such as the assay described herein.

[0131] In particular embodiments, the antagonist of IL-1R1 comprises an antagonist of IL-1R1 moiety that is a dAb. For example, the antagonist of IL-1R1 comprises a dAb that competes with a dAb for binding to IL-1R1, wherein the dAb is selected from the group consisting of DOM4-122-23 (SEQ ID NO:1), DOM4-122-24 (SEQ ID NO:2), DOM4-130-30 (SEQ ID NO:3), DOM4-130-46 (SEQ ID NO:4), DOM4-130-51 (SEQ ID NO:5), DOM4-130-53 (SEQ ID NO:6), DOM4-130-54 (SEQ ID NO:7), DOM4-1 (SEQ ID NO:8), DOM4-2 (SEQ ID NO:9), DOM4-3 (SEQ ID NO:10), DOM4-4 (SEQ ID NO:11), DOM4-5 (SEQ ID NO:12), DOM4-6 (SEQ ID NO:13), DOM4-7 (SEQ ID NO:14), DOM4-8 (SEQ ID NO:15), DOM4-9 (SEQ ID NO:16), DOM4-10 (SEQ ID NO:17), DOM4-11 (SEQ ID NO:18), DOM4-12 (SEQ ID NO:19), DOM4-13 (SEQ ID NO:20), DOM4-14 (SEQ ID NO:21), DOM4-15 (SEQ ID NO:22), DOM4-20 (SEQ ID NO:23), DOM4-21 (SEQ ID NO:24), DOM4-22 (SEQ ID NO:25), DOM4-23 (SEQ ID NO:26), DOM4-25 (SEQ ID NO:27), DOM4-26 (SEQ ID NO:28), DOM4-27 (SEQ ID NO:29), DOM4-28 (SEQ ID NO:30), DOM4-29 (SEQ ID NO:31), DOM4-31 (SEQ ID NO:32), DOM4-32 (SEQ ID NO:33), DOM4-33 (SEQ ID NO:34), DOM4-34 (SEQ ID NO:35), DOM4-36 (SEQ ID NO:36), DOM4-37 (SEQ ID NO:37), DOM4-38 (SEQ ID NO:38), DOM4-39 (SEQ ID NO:39), DOM4-40 (SEQ ID NO:40), DOM4-41 (SEQ ID NO:41), DOM4-42 (SEQ ID NO:42), DOM4-44 (SEQ ID NO:43), DOM4-45 (SEQ ID NO:44), DOM4-46 (SEQ ID NO:45), DOM4-49 (SEQ ID NO:46), DOM4-50 (SEQ ID NO:47), DOM4-74 (SEQ ID NO:48), DOM4-75 (SEQ ID NO:49), DOM4-76 (SEQ ID NO:50), DOM4-78 (SEQ ID NO:51), DOM4-79 (SEQ ID NO:52), DOM4-80 (SEQ ID NO:53), DOM4-81 (SEQ ID NO:54), DOM4-82 (SEQ ID NO:55), DOM4-83 (SEQ ID NO:56), DOM4-84 (SEQ ID NO:57), DOM4-85 (SEQ ID NO:58), DOM4-86 (SEQ ID NO:59), DOM4-87 (SEQ ID NO:60), DOM4-88 (SEQ ID NO:61), DOM4-89 (SEQ ID NO:62), DOM4-90 (SEQ ID NO:63), DOM4-91 (SEQ ID NO:64), DOM4-92 (SEQ ID NO:65), DOM4-93 (SEQ ID NO:66), DOM4-94 (SEQ ID NO:67), DOM4-95 (SEQ ID NO:68), DOM4-96 (SEQ ID NO:69), DOM4-97 (SEQ ID NO:70), DOM4-98 (SEQ ID NO:71), DOM4-99 (SEQ ID NO:72), DOM4-100 (SEQ ID NO:73), DOM4-101 (SEQ ID NO:74), DOM4-102 (SEQ ID NO:75), DOM4-103 (SEQ ID NO:76), DOM4-104 (SEQ ID NO:77), DOM4-105 (SEQ ID NO:78), DOM4-106 (SEQ ID NO:79), DOM4-107 (SEQ ID NO:80), DOM4-108 (SEQ ID NO:81), DOM4-109 (SEQ ID NO:82), DOM4-110 (SEQ ID NO:83), DOM4-111 (SEQ ID NO:84), DOM4-112 (SEQ ID NO:85), DOM4-113 (SEQ ID NO:86), DOM4-114 (SEQ ID NO:87), DOM4-115 (SEQ ID NO:88), DOM4-116 (SEQ ID NO:89), DOM4-117 (SEQ ID NO:90), DOM4-118 (SEQ ID NO:91), DOM4-119 (SEQ ID NO:92), DOM4-120 (SEQ ID NO:93), DOM4-121 (SEQ ID NO:94), DOM4-122 (SEQ ID NO:95), DOM4-122-1 (SEQ ID NO:96), DOM4-122-2 (SEQ ID NO:97), DOM4-122-3 (SEQ ID NO:98), DOM4-122-4 (SEQ ID NO:99), DOM4-122-5 (SEQ ID NO:100), DOM4-122-6 (SEQ ID NO:101), DOM4-122-7 (SEQ ID NO:102), DOM4-122-8 (SEQ ID NO:103), DOM4-122-9 (SEQ ID NO:104), DOM4-122-10 (SEQ ID NO:105), DOM4-122-11 (SEQ ID NO:106), DOM4-122-12 (SEQ ID NO:107), DOM4-122-13 (SEQ ID NO:108), DOM4-122-14 (SEQ ID NO:109), DOM4-122-15 (SEQ ID NO:110), DOM4-122-16 (SEQ ID NO:111), DOM4-122-17 (SEQ ID NO:112), DOM4-122-18 (SEQ ID NO:113), DOM4-122-19 (SEQ ID NO:114), DOM4-122-20 (SEQ ID NO:115), DOM4-122-21 (SEQ ID NO:116), DOM4-122-22 (SEQ ID NO:117), DOM4-122-25 (SEQ ID NO:118), DOM4-122-26 (SEQ ID NO:119), DOM4-122-27 (SEQ ID NO:120), DOM4-122-28 (SEQ ID NO:121), DOM4-122-29 (SEQ ID NO:122), DOM4-122-30 (SEQ ID NO:123), DOM4-12-2-31 (SEQ ID NO:124), DOM4-122-32 (SEQ ID NO:125), DOM4-122-33 (SEQ ID NO:126), DOM4-122-34 (SEQ ID NO:127), DOM4-122-35 (SEQ ID NO:128), DOM4-122-36 (SEQ ID NO:129), DOM4-122-37 (SEQ ID NO:130), DOM4-122-38 (SEQ ID NO:131), DOM4-122-39 (SEQ ID NO:132), DOM4-122-40 (SEQ ID NO:133), DOM4-122-41 (SEQ ID NO:134), DOM4-122-42 (SEQ ID NO:135), DOM4-122-43 (SEQ ID NO:136), DOM4-122-44 (SEQ ID NO:137), DOM4-122-45 (SEQ ID NO:138), DOM4-122-46 (SEQ ID NO:139), DOM4-122-47 (SEQ ID NO:140), DOM4-122-48 (SEQ ID NO:141), DOM4-122-49 (SEQ ID NO:142), DOM4-122-50 (SEQ ID NO:143), DOM4-122-51 (SEQ ID NO:144), DOM4-122-52 (SEQ ID NO:145), DOM4-122-54 (SEQ ID NO:146), DOM4-122-55 (SEQ ID NO:147), DOM4-122-56 (SEQ ID NO:148), DOM4-122-57 (SEQ ID NO:149), DOM4-122-58 (SEQ ID NO:150), DOM4-122-59 (SEQ ID NO:151), DOM4-122-60 (SEQ ID NO:152), DOM4-122-61 (SEQ ID NO:153), DOM4-122-62 (SEQ ID NO:154), DOM4-122-63 (SEQ ID NO:155), DOM4-122-64 (SEQ ID NO:156), DOM4-122-65 (SEQ ID NO:157), DOM4-122-66 (SEQ ID NO:158), DOM4-122-67 (SEQ ID NO:159), DOM4-122-68 (SEQ ID NO:160), DOM4-122-69 (SEQ ID NO:161), DOM4-122-70 (SEQ ID NO:162), DOM4-122-71 (SEQ ID NO:163), DOM4-122-72 (SEQ ID NO:164), DOM4-122-73 (SEQ ID NO:165), DOM4-123 (SEQ ID NO:166), DOM4-124 (SEQ ID NO:167) DOM4-125 (SEQ ID NO:168), DOM4-126 (SEQ ID NO:169), DOM4-127 (SEQ ID NO:170), DOM4-128 (SEQ ID NO:171), DOM4-129 (SEQ ID NO:172), DOM4-129-1 (SEQ ID NO:173), DOM4-129-2 (SEQ ID NO:174), DOM4-129-3 (SEQ ID NO:175), DOM4-129-4 (SEQ ID NO:176), DOM4-129-5 (SEQ ID NO:177), DOM4-129-6 (SEQ ID NO:178), DOM4-129-7 (SEQ ID NO:179), DOM4-129-8 (SEQ ID NO:180), DOM4-129-9 (SEQ ID NO:181), DOM4-129-10 (SEQ ID NO:182), DOM4-129-11 (SEQ ID NO:183), DOM4-129-12 (SEQ ID NO:184), DOM4-129-13 (SEQ ID NO:185), DOM4-129-14 (SEQ ID NO:186), DOM4-129-15 (SEQ ID NO:187), DOM4-129-16 (SEQ ID NO:188), DOM4-129-17 (SEQ ID NO:189), DOM4-129-18 (SEQ ID NO:190), DOM4-129-19 (SEQ ID NO:191), DOM4-129-20 (SEQ ID NO:192), DOM4-129-21 (SEQ ID NO:193), DOM4-129-22 (SEQ ID NO: 94), DOM4-129-23 (SEQ ID NO: 195), DOM4-129-24 (SEQ ID NO:196), DOM4-129-25 (SEQ ID NO:197), DOM4-129-26 (SEQ ID NO:198), DOM4-129-27 (SEQ ID NO:199), DOM4-129-28 (SEQ ID NO:200), DOM4-129-29 (SEQ ID NO:201), DOM4-129-31 (SEQ ID NO:202), DOM4-129-32 (SEQ ID NO:203), DOM4-129-33 (SEQ ID NO:204), DOM4-129-34 (SEQ ID NO:205), DOM4-129-35 (SEQ ID NO:206), DOM4-129-37 (SEQ ID NO:207), DOM4-129-38 (SEQ ID NO:208), DOM4-129-39 (SEQ ID NO:209), DOM4-129-40 (SEQ ID NO:210), DOM4-129-41 (SEQ ID NO:211), DOM4-129-42 (SEQ ID NO:212), DOM4-129-43 (SEQ ID NO:213), DOM4-129-44 (SEQ ID NO:214), DOM4-130 (SEQ ID NO:215), DOM4-130-1 (SEQ ID NO:216), DOM4-130-2 (SEQ ID NO:217), DOM4-130-3 (SEQ ID NO:218), DOM4-130-4 (SEQ ID NO:219), DOM4-130-5 (SEQ ID NO:220), DOM4-130-6 (SEQ ID NO:221), DOM4-130-7 (SEQ ID NO:222), DOM4-130-8 (SEQ ID NO:223), DOM4-130-9 (SEQ ID NO:224), DOM4-130-10 (SEQ ID NO:225), DOM4-130-11 (SEQ ID NO:226), DOM4-130-12 (SEQ ID NO:227), DOM4-130-13 (SEQ ID NO:228), DOM4-130-14 (SEQ ID NO:229), DOM4-130-15 (SEQ ID NO:230), DOM4-130-16 (SEQ ID NO:231), DOM4-130-17 (SEQ ID NO:232), DOM4-130-18 (SEQ ID NO:233), DOM4-130-19 (SEQ ID NO:234), DOM4-130-20 (SEQ ID NO:235), DOM4-130-21 (SEQ ID NO:236), DOM4-130-22 (SEQ ID NO:237), DOM4-130-23 (SEQ ID NO:238), DOM4-130-24 (SEQ ID NO:239), DOM4-130-25 (SEQ ID NO:240), DOM4-130-26 (SEQ ID NO:241), DOM4-130-27 (SEQ ID NO:242), DOM4-130-28 (SEQ ID NO:243), DOM4-130-31 (SEQ ID NO:244), DOM4-130-32 (SEQ ID NO:245), DOM4-130-33 (SEQ ID NO:246), DOM4-130-34 (SEQ ID NO:247), DOM4-130-35 (SEQ ID NO:248), DOM4-130-36 (SEQ ID NO:249), DOM4-130-37 (SEQ ID NO:250), DOM4-130-38 (SEQ ID NO:251), DOM4-130-39 (SEQ ID NO:252), DOM4-130-40 (SEQ ID NO:253), DOM4-130-41 (SEQ ID NO:254), DOM4-130-42 (SEQ ID NO:255), DOM4-130-43 (SEQ ID NO:256), DOM4-130-44 (SEQ ID NO:257), DOM4-130-45 (SEQ ID NO:258), DOM4-130-46 (SEQ TD NO:259), DOM4-130-47 (SEQ ID NO:260), DOM4-130-48 (SEQ ID NO:261), DOM4-130-49 (SEQ ID NO:262), DOM4-130-50 (SEQ ID NO:263), DOM4-130-51 (SEQ ID NO:264), DOM4-130-52 (SEQ ID NO:265), DOM4-130-53 (SEQ ID NO:266), DOM4-130-54 (SEQ ID NO:267), DOM4-130-55 (SEQ ID NO:268), DOM4-130-56 (SEQ ID NO:269), DOM4-130-57 (SEQ ID NO:270), DOM4-130-58 (SEQ ID NO:271), DOM4-130-59 (SEQ ID NO:272), DOM4-130-60 (SEQ ID NO:273), DOM4-130-61 (SEQ ID NO:274), DOM4-130-62 (SEQ ID NO:275), DOM4-130-63 (SEQ ID NO:276), DOM4-130-64 (SEQ ID NO:277), DOM4-130-65 (SEQ ID NO:278), DOM4-130-66 (SEQ ID NO:279), DOM4-130-67 (SEQ ID NO:280), DOM4-130-68 (SEQ ID NO:281), DOM4-130-69 (SEQ ID NO:282), DOM4-130-70 (SEQ ID NO:283), DOM4-130-71 (SEQ ID NO:284), DOM4-130-72 (SEQ ID NO:285), DOM4-130-73 (SEQ ID NO:286), DOM4-130-74 (SEQ ID NO:287), DOM4-130-75 (SEQ ID NO:288), DOM4-130-76 (SEQ ID NO:289), DOM4-130-77 (SEQ ID NO:290), DOM4-130-78 (SEQ ID NO:291), DOM4-130-79 (SEQ ID NO:292), DOM4-130-80 (SEQ ID NO:293), DOM4-130-81 (SEQ ID NO:294), DOM4-130-82 (SEQ ID NO:295), DOM4-130-83 (SEQ ID NO:296), DOM4-130-84 (SEQ ID NO:297), DOM4-130-85 (SEQ ID NO:298), DOM4-130-86 (SEQ ID NO:299), DOM4-130-87 (SEQ ID NO:300), DOM4-130-88 (SEQ ID NO:301), DOM4-130-89 (SEQ ID NO:302), DOM4-130-90 (SEQ ID NO:303), DOM4-130-91 (SEQ ID NO:304), DOM4-130-92 (SEQ ID NO:305), DOM4-130-93 (SEQ ID NO:306), DOM4-130-94 (SEQ ID NO:307), DOM4-130-95 (SEQ ID NO:308), DOM4-130-96 (SEQ ID NO:309), DOM4-130-97 (SEQ ID NO:310), DOM4-130-98 (SEQ ID NO:311), DOM4-130-99 (SEQ ID NO:312), DOM4-130-100 (SEQ ID NO:313), DOM4-130-101 (SEQ ID NO:314), DOM4-130-102 (SEQ ID NO:315), DOM4-130-103 (SEQ ID NO:316), DOM4-130-104 (SEQ ID NO:317), DOM4-130-105 (SEQ ID NO:318), DOM4-130-106 (SEQ ID NO:319), DOM4-130-107 (SEQ ID NO:320), DOM4-130-108 (SEQ ID NO:321), DOM4-130-109 (SEQ ID NO:322), DOM4-130-110 (SEQ ID NO:323), DOM4-130-111 (SEQ ID NO:324), DOM4-130-112 (SEQ ID NO:325), DOM4-130-113 (SEQ ID NO:326), DOM4-130-114 (SEQ ID NO:327), DOM4-130-115 (SEQ ID NO:328), DOM4-130-116 (SEQ ID NO:329), DOM4-130-117 (SEQ ID NO:330), DOM4-130-118 (SEQ ID NO:331), DOM4-130-119 (SEQ ID NO:332), DOM4-130-120 (SEQ ID NO:333), DOM4-130-121 (SEQ ID NO:334), DOM4-130-122 (SEQ ID NO:335), DOM4-130-123 (SEQ ID NO:336), DOM4-130-124 (SEQ ID NO:337), DOM4-130-125 (SEQ ID NO:338), DOM4-130-126 (SEQ ID NO:339), DOM4-130-127 (SEQ ID NO:340), DOM4-130-128 (SEQ ID NO:341), DOM4-130-129 (SEQ ID NO:342), DOM4-130-130 (SEQ ID NO:343), DOM4-130-131 (SEQ ID NO:344), DOM4-130-132 (SEQ ID NO:345), DOM4-130-133 (SEQ ID NO:346), DOM4-131 (SEQ ID NO:347), DOM4-132 (SEQ ID NO:348), and DOM4-133 (SEQ ID NO:349).

[0132] In other embodiments, the antagonists of IL-1R1 comprises a dAb having an amino acid sequence that has at least about 80%, or at least about 85%, or at least about 90%, or at least about 95%, or at least about 96%, or at least about 97%, or at least about 98%, or at least about 99% amino acid sequence identity with DOM4-122-23 (SEQ ID NO:1), DOM4-122-24 (SEQ ID NO:2), DOM4-130-30 (SEQ ID NO:3), DOM4-130-46 (SEQ ID NO:4), DOM4-130-51 (SEQ ID NO:5), DOM4-130-53 (SEQ ID NO:6), DOM4-130-54 (SEQ ID NO:7), DOM4-1 (SEQ ID NO:8), DOM4-2 (SEQ ID NO:9), DOM4-3 (SEQ ID NO:10), DOM4-4 (SEQ ID NO:11), DOM4-5 (SEQ ID NO:12), DOM4-6 (SEQ ID NO:13), DOM4-7 (SEQ ID NO:14), DOM4-8 (SEQ ID NO:15), DOM4-9 (SEQ ID NO:16), DOM4-10 (SEQ ID NO:17), DOM4-11 (SEQ ID NO:18), DOM4-12 (SEQ ID NO:19), DOM4-13 (SEQ ID NO:20), DOM4-14 (SEQ ID NO:21), DOM4-15 (SEQ ID NO:22), DOM4-20 (SEQ ID NO:23), DOM4-21 (SEQ ID NO:24), DOM4-22 (SEQ ID NO:25), DOM4-23 (SEQ ID NO:26), DOM4-25 (SEQ ID NO:27), DOM4-26 (SEQ ID NO:28), DOM4-27 (SEQ ID NO:29), DOM4-28 (SEQ ID NO:30), DOM4-29 (SEQ ID NO:31), DOM4-31 (SEQ ID NO:32), DOM4-32 (SEQ ID NO:33), DOM4-33 (SEQ ID NO:34), DOM4-34 (SEQ ID NO:35), DOM4-36 (SEQ ID NO:36), DOM4-37 (SEQ ID NO:37), DOM4-38 (SEQ ID NO:38), DOM4-39 (SEQ ID NO:39), DOM4-40 (SEQ ID NO:40), DOM4-41 (SEQ ID NO:41), DOM4-42 (SEQ ID NO:42), DOM4-44 (SEQ ID NO:43), DOM4-45 (SEQ ID NO:44), DOM4-46 (SEQ ID NO:45), DOM4-49 (SEQ ID NO:46), DOM4-50 (SEQ ID NO:47), DOM4-74 (SEQ ID NO:48), DOM4-75 (SEQ ID NO:49), DOM4-76 (SEQ ID NO:50), DOM4-78 (SEQ ID NO:51), DOM4-79 (SEQ ID NO:52), DOM4-80 (SEQ ID NO:53), DOM4-81 (SEQ ID NO:54), DOM4-82 (SEQ ID NO:55), DOM4-83 (SEQ ID NO:56), DOM4-84 (SEQ ID NO:57), DOM4-85 (SEQ ID NO:58), DOM4-86 (SEQ ID NO:59), DOM4-87 (SEQ ID NO:60), DOM4-88 (SEQ ID NO:61), DOM4-89 (SEQ ID NO:62), DOM4-90 (SEQ ID NO:63), DOM4-91 (SEQ ID NO:64), DOM4-92 (SEQ ID NO:65), DOM4-93 (SEQ ID NO:66), DOM4-94 (SEQ ID NO:67), DOM4-95 (SEQ ID NO:68), DOM4-96 (SEQ ID NO:69), DOM4-97 (SEQ ID NO:70), DOM4-98 (SEQ ID NO:71), DOM4-99 (SEQ ID NO:72), DOM4-100 (SEQ ID NO:73), DOM4-101 (SEQ ID NO:74), DOM4-102 (SEQ ID NO:75), DOM4-103 (SEQ ID NO:76), DOM4-104 (SEQ ID NO:77), DOM4-105 (SEQ ID NO:78), DOM4-106 (SEQ ID NO:79), DOM4-107 (SEQ ID NO:80), DOM4-108 (SEQ ID NO:81), DOM4-109 (SEQ ID NO:82), DOM4-110 (SEQ ID NO:83), DOM4-111 (SEQ ID NO:84), DOM4-112 (SEQ ID NO:85), DOM4-113 (SEQ ID NO:86), DOM4-114 (SEQ ID NO:87), DOM4-115 (SEQ ID NO:88), DOM4-116 (SEQ ID NO:89), DOM4-117 (SEQ ID NO:90), DOM4-118 (SEQ ID NO:91), DOM4-119 (SEQ ID NO:92), DOM4-120 (SEQ ID NO:93), DOM4-121 (SEQ ID NO:94), DOM4-122 (SEQ ID NO:95), DOM4-122-1 (SEQ ID NO:96), DOM4-122-2 (SEQ ID NO:97), DOM4-122-3 (SEQ ID NO:98), DOM4-122-4 (SEQ ID NO:99), DOM4-122-5 (SEQ ID NO:100), DOM4-122-6 (SEQ ID NO:101), DOM4-122-7 (SEQ ID NO:102), DOM4-122-8 (SEQ ID NO:103), DOM4-122-9 (SEQ ID NO:104), DOM4-122-10 (SEQ ID NO:105), DOM4-122-11 (SEQ ID NO:106), DOM4-122-12 (SEQ ID NO:107), DOM4-122-13 (SEQ ID NO:108), DOM4-122-14 (SEQ ID NO:109), DOM4-122-15 (SEQ ID NO:110), DOM4-122-16 (SEQ ID NO:111), DOM4-122-17 (SEQ ID NO:112), DOM4-122-18 (SEQ ID NO:113), DOM4-122-19 (SEQ ID NO:114), DOM4-122-20 (SEQ ID NO:115), DOM4-122-21 (SEQ ID NO:116), DOM4-122-22 (SEQ ID NO:117), DOM4-122-25 (SEQ ID NO:118), DOM4-122-26 (SEQ ID NO:119), DOM4-122-27 (SEQ ID NO:120), DOM4-122-28 (SEQ ID NO:121), DOM4-122-29 (SEQ ID NO:122), DOM4-122-30 (SEQ ID NO:123), DOM4-122-31 (SEQ ID NO:124), DOM4-122-32 (SEQ ID NO:125), DOM4-122-33 (SEQ ID NO:126), DOM4-122-34 (SEQ ID NO:127), DOM4-122-35 (SEQ ID NO:128), DOM4-122-36 (SEQ ID NO:129), DOM4-122-37 (SEQ ID NO:130), DOM4-122-38 (SEQ ID NO:131), DOM4-122-39 (SEQ ID NO:132), DOM4-122-40 (SEQ ID NO:133), DOM4-122-41 (SEQ ID NO:134), DOM4-122-42 (SEQ ID NO:135), DOM4-122-43 (SEQ ID NO:136), DOM4-122-44 (SEQ ID NO:137), DOM4-122-45 (SEQ ID NO:138), DOM4-122-46 (SEQ ID NO:139), DOM4-122-47 (SEQ ID NO:140), DOM4-122-48 (SEQ ID NO:141), DOM4-122-49 (SEQ ID NO:142), DOM4-122-50 (SEQ ID NO:143), DOM4-122-51 (SEQ ID NO:144), DOM4-122-52 (SEQ ID NO:145), DOM4-122-54 (SEQ ID NO:146), DOM4-122-55 (SEQ ID NO:147), DOM4-122-56 (SEQ ID NO:148), DOM4-122-57 (SEQ ID NO:149), DOM4-122-58 (SEQ ID NO:150), DOM4-122-59 (SEQ ID NO:151), DOM4-122-60 (SEQ ID NO:152), DOM4-122-61 (SEQ ID NO:153), DOM4-122-62 (SEQ ID NO:154), DOM4-122-63 (SEQ ID NO:155), DOM4-122-64 (SEQ ID NO:156), DOM4-122-65 (SEQ ID NO:157), DOM4-122-66 (SEQ ID NO:158), DOM4-122-67 (SEQ ID NO:159), DOM4-122-68 (SEQ ID NO:160), DOM4-122-69 (SEQ ID NO:161), DOM4-122-70 (SEQ ID NO:162), DOM4-122-71 (SEQ ID NO:163), DOM4-122-72 (SEQ ID NO:164), DOM4-122-73 (SEQ ID NO:165), DOM4-123 (SEQ ID NO:166), DOM4-124 (SEQ ID NO:167) DOM4-125 (SEQ ID NO:168), DOM4-126 (SEQ ID NO:169), DOM4-127 (SEQ ID NO:170), DOM4-128 (SEQ ID NO:171), DOM4-129 (SEQ ID NO:172), DOM4-129-1 (SEQ ID NO:173), DOM4-129-2 (SEQ ID NO:174), DOM4-129-3 (SEQ ID NO:175), DOM4-129-4 (SEQ ID NO:176), DOM4-129-5 (SEQ ID NO:177), DOM4-129-6 (SEQ ID NO:178), DOM4-129-7 (SEQ ID NO:179), DOM4-129-8 (SEQ ID NO:180), DOM4-129-9 (SEQ ID NO:181), DOM4-129-10 (SEQ ID NO:182), DOM4-129-11 (SEQ ID NO:183), DOM4-129-12 (SEQ ID NO:184), DOM4-129-13 (SEQ ID NO:185), DOM4-129-14 (SEQ ID NO:186), DOM4-129-15 (SEQ ID NO:187), DOM4-129-16 (SEQ ID NO:188), DOM4-129-17 (SEQ ID NO:189), DOM4-129-18 (SEQ ID NO:190), DOM4-129-19 (SEQ ID NO:191), DOM4-129-20 (SEQ ID NO:192), DOM4-129-21 (SEQ ID NO:193), DOM4-129-22 (SEQ ID NO:194), DOM4-129-23 (SEQ ID NO:195), DOM4-129-24 (SEQ ID NO:196), DOM4-129-25 (SEQ ID NO:197), DOM4-129-26 (SEQ ID NO:198), DOM4-129-27 (SEQ ID NO:199), DOM4-129-28 (SEQ ID NO:200), DOM4-129-29 (SEQ ID NO:201), DOM4-129-31 (SEQ ID NO:202), DOM4-129-32 (SEQ ID NO:203), DOM4-129-33 (SEQ ID NO:204), DOM4-129-34 (SEQ ID NO:205), DOM4-129-35 (SEQ ID NO:206), DOM4-129-37 (SEQ ID NO:207), DOM4-129-38 (SEQ ID NO:208), DOM4-129-39 (SEQ ID NO:209), DOM4-129-40 (SEQ ID NO:210), DOM4-129-41 (SEQ ID NO:211), DOM4-129-42 (SEQ ID NO:212), DOM4-129-43 (SEQ ID NO:213), DOM4-129-44 (SEQ ID NO:214), DOM4-130 (SEQ ID NO:215), DOM4-130-1 (SEQ ID NO:216), DOM4-130-2 (SEQ ID NO:217), DOM4-130-3 (SEQ ID NO:218), DOM4-130-4 (SEQ ID NO:219), DOM4-130-5 (SEQ ID NO:220), DOM4-130-6 (SEQ ID NO:221), DOM4-130-7 (SEQ ID NO:222), DOM4-1130-8 (SEQ ID NO:223), DOM4-130-9 (SEQ ID NO:224), DOM4-130-10 (SEQ ID NO:225), DOM4-130-11 (SEQ ID NO:226), DOM4-130-12 (SEQ ID NO:227), DOM4-130-13 (SEQ ID NO:228), DOM4-130-14 (SEQ ID NO:229), DOM4-130-15 (SEQ ID NO:230), DOM4-130-16 (SEQ ID NO:231), DOM4-130-17 (SEQ ID NO:232), DOM4-130-18 (SEQ ID NO:233), DOM4-130-19 (SEQ ID NO:234), DOM4-130-20 (SEQ ID NO:235), DOM4-130-21 (SEQ ID NO:236), DOM4-130-22 (SEQ ID NO:237), DOM4-130-23 (SEQ ID NO:238), DOM4-130-24 (SEQ ID NO:239), DOM4-130-25 (SEQ ID NO:240), DOM4-130-26 (SEQ ID NO:241), DOM4-130-27 (SEQ ID NO:242), DOM4-130-28 (SEQ ID NO:243), DOM4-130-31 (SEQ ID NO:244), DOM4-130-32 (SEQ ID NO:245), DOM4-130-33 (SEQ ID NO:246), DOM4-130-34 (SEQ ID NO:247), DOM4-130-35 (SEQ ID NO:248), DOM4-130-36 (SEQ ID NO:249), DOM4-130-37 (SEQ ID NO:250), DOM4-130-38 (SEQ ID NO:251), DOM4-130-39 (SEQ ID NO:252), DOM4-130-40 (SEQ ID NO:253), DOM4-130-41 (SEQ ID NO:254), DOM4-130-42 (SEQ ID NO:255), DOM4-130-43 (SEQ ID NO:256), DOM4-130-44 (SEQ ID NO:257), DOM4-130-45 (SEQ ID NO:258), DOM4-130-46 (SEQ ID NO:259), DOM4-130-47 (SEQ ID NO:260), DOM4-130-48 (SEQ ID NO:261), DOM4-130-49 (SEQ ID NO:262), DOM4-130-50 (SEQ ID NO:263), DOM4-130-51 (SEQ ID NO:264), DOM4-130-52 (SEQ ID NO:265), DOM4-130-53 (SEQ ID NO:266), DOM4-130-54 (SEQ ID NO:267), DOM4-130-55 (SEQ ID NO:268), DOM4-130-56 (SEQ ID NO:269), DOM4-130-57 (SEQ ID NO:270), DOM4-130-58 (SEQ ID NO:271), DOM4-130-59 (SEQ ID NO:272), DOM4-130-60 (SEQ ID NO:273), DOM4-130-61 (SEQ ID NO:274), DOM4-130-62 (SEQ ID NO:275), DOM4-130-63 (SEQ ID NO:276), DOM4-130-64 (SEQ ID NO:277), DOM4-130-65 (SEQ ID NO:278), DOM4-130-66 (SEQ ID NO:279), DOM4-130-67 (SEQ ID NO:280), DOM4-130-68 (SEQ ID NO:281), DOM4-130-69 (SEQ ID NO:282), DOM4-130-70 (SEQ ID NO:283), DOM4-130-71 (SEQ ID NO:284), DOM4-130-72 (SEQ ID NO:285), DOM4-130-73 (SEQ ID NO:286), DOM4-130-74 (SEQ ID NO:287), DOM4-130-75 (SEQ ID NO:288), DOM4-130-76 (SEQ ID NO:289), DOM4-130-77 (SEQ ID NO:290), DOM4-130-78 (SEQ ID NO:291), DOM4-130-79 (SEQ ID NO:292), DOM4-130-80 (SEQ ID NO:293), DOM4-130-81 (SEQ ID NO:294), DOM4-130-82 (SEQ ID NO:295), DOM4-130-83 (SEQ ID NO:296), DOM4-130-84 (SEQ ID NO:297), DOM4-130-85 (SEQ ID NO:298), DOM4-130-86 (SEQ ID NO:299), DOM4-130-87 (SEQ ID NO:300), DOM4-130-88 (SEQ ID NO:301), DOM4-130-89 (SEQ ID NO:302), DOM4-130-90 (SEQ ID NO:303), DOM4-130-91 (SEQ ID NO:304), DOM4-130-92 (SEQ ID NO:305), DOM4-130-93 (SEQ ID NO:306), DOM4-130-94 (SEQ ID NO:307), DOM4-130-95 (SEQ ID NO:308), DOM4-130-96 (SEQ ID NO:309), DOM4-130-97 (SEQ ID NO:310), DOM4-130-98 (SEQ ID NO:311), DOM4-130-99 (SEQ ID NO:312), DOM4-130-100 (SEQ ID NO:313), DOM4-130-101 (SEQ ID NO:314), DOM4-130-102 (SEQ ID NO:315), DOM4-130-103 (SEQ ID NO:316), DOM4-130-104 (SEQ ID NO:317), DOM4-130-105 (SEQ ID NO:318), DOM4-130-106 (SEQ ID NO:319), DOM4-130-107 (SEQ ID NO:320), DOM4-130-108 (SEQ ID NO:321), DOM4-130-109 (SEQ ID NO:322), DOM4-130-110 (SEQ ID NO:323), DOM4-130-111 (SEQ ID NO:324), DOM4-130-112 (SEQ ID NO:325), DOM4-130-113 (SEQ ID NO:326), DOM4-130-114 (SEQ ID NO:327), DOM4-130-115 (SEQ ID NO:328), DOM4-130-116 (SEQ ID NO:329), DOM4-130-117 (SEQ ID NO:330), DOM4-130-118 (SEQ ID NO:331), DOM4-130-119 (SEQ ID NO:332), DOM4-130-120 (SEQ ID NO:333), DOM4-130-121 (SEQ ID NO:334), DOM4-130-122 (SEQ ID NO:335), DOM4-130-123 (SEQ ID NO:336), DOM4-130-124 (SEQ ID NO:337), DOM4-130-125 (SEQ ID NO:338), DOM4-130-126 (SEQ ID NO:339), DOM4-130-127 (SEQ ID NO:340), DOM4-130-128 (SEQ ID NO:341), DOM4-130-129 (SEQ ID NO:342), DOM4-130-130 (SEQ ID NO:343), DOM4-130-131 (SEQ ID NO:344), DOM4-130-132 (SEQ ID NO:345), DOM4-130-133 (SEQ ID NO:346), DOM4-131 (SEQ ID NO:347), DOM4-132 (SEQ ID NO:348), and DOM4-133 (SEQ ID NO:349).

[0133] Amino acid sequence identity is preferably determined using a suitable sequence alignment algorithm and default parameters, such as BLAST P (Karlin and Altschul, Proc. Natl. Acad. Sci. USA 87(6):2264-2268 (1990)).

[0134] In other embodiments, the antagonists of IL-1R1 comprises a e that has an amino acid sequence selected from the group consisting of DOM4-122-23 (SEQ ID NO:1), DOM4-122-24 (SEQ ID NO:2), DOM4-130-30 (SEQ ID NO:3), DOM4-130-46 (SEQ ID NO:4), DOM4-130-51 (SEQ ID NO:5), DOM4-130-53 (SEQ ID NO:6), DOM4-130-54 (SEQ ID NO:7), DOM4-1 (SEQ ID NO:8), DOM4-2 (SEQ ID NO:9), DOM4-3 (SEQ ID NO:10), DOM4-4 (SEQ ID NO:11), DOM4-5 (SEQ ID NO:12), DOM4-6 (SEQ ID NO:13), DOM4-7 (SEQ ID NO:14), DOM4-8 (SEQ ID NO:15), DOM4-9 (SEQ ID NO:16), DOM4-10 (SEQ ID NO:17), DOM4-11 (SEQ ID NO:18), DOM4-12 (SEQ ID NO:19), DOM4-13 (SEQ ID NO:20), DOM4-14 (SEQ ID NO:21), DOM4-15 (SEQ ID NO:22), DOM4-20 (SEQ ID NO:23), DOM4-21 (SEQ ID NO:24), DOM4-22 (SEQ ID NO:25), DOM4-23 (SEQ ID NO:26), DOM4-25 (SEQ ID NO:27), DOM4-26 (SEQ ID NO:28), DOM4-27 (SEQ ID NO:29), DOM4-28 (SEQ ID NO:30), DOM4-29 (SEQ ID NO:31), DOM4-31 (SEQ ID NO:32), DOM4-32 (SEQ ID NO:33), DOM4-33 (SEQ ID NO:34), DOM4-34 (SEQ ID NO:35), DOM4-36 (SEQ ID NO:36), DOM4-37 (SEQ ID NO:37), DOM4-38 (SEQ ID NO:38), DOM4-39 (SEQ ID NO:39), DOM4-40 (SEQ ID NO:40), DOM4-41 (SEQ ID NO:41), DOM4-42 (SEQ ID NO:42), DOM4-44 (SEQ ID NO:43), DOM4-45 (SEQ ID NO:44), DOM4-46 (SEQ ID NO:45), DOM4-49 (SEQ ID NO:46), DOM4-50 (SEQ ID NO:47), DOM4-74 (SEQ ID NO:48), DOM4-75 (SEQ ID NO:49), DOM4-76 (SEQ ID NO:50), DOM4-78 (SEQ ID NO:51), DOM4-79 (SEQ ID NO:52), DOM4-80 (SEQ ID NO:53), DOM4-81 (SEQ ID NO:54), DOM4-82 (SEQ ID NO:55), DOM4-83 (SEQ ID NO:56), DOM4-84 (SEQ ID NO:57), DOM4-85 (SEQ ID NO:58), DOM4-86 (SEQ ID NO:59), DOM4-87 (SEQ ID NO:60), DOM4-88 (SEQ ID NO:61), DOM4-89 (SEQ ID NO:62), DOM4-90 (SEQ ID NO:63), DOM4-91 (SEQ ID NO:64), DOM4-92 (SEQ ID NO:65), DOM4-93 (SEQ ID NO:66), DOM4-94 (SEQ ID NO:67), DOM4-95 (SEQ ID NO:68), DOM4-96 (SEQ ID NO:69), DOM4-97 (SEQ ID NO:70), DOM4-98 (SEQ ID NO:71), DOM4-99 (SEQ ID NO:72), DOM4-100 (SEQ ID NO:73), DOM4-101 (SEQ ID NO:74), DOM4-102 (SEQ ID NO:75), DOM4-103 (SEQ ID NO:76), DOM4-104 (SEQ ID NO:77), DOM4-105 (SEQ ID NO:78), DOM4-106 (SEQ ID NO:79), DOM4-107 (SEQ ID NO:80), DOM4-108 (SEQ ID NO:81), DOM4-109 (SEQ ID NO:82), DOM4-110 (SEQ ID NO:83), DOM4-111 (SEQ ID NO:84), DOM4-112 (SEQ ID NO:85), DOM4-113 (SEQ ID NO:86), DOM4-114 (SEQ ID NO:87), DOM4-115 (SEQ ID NO:88), DOM4-116 (SEQ ID NO:89), DOM4-117 (SEQ ID NO:90), DOM4-118 (SEQ ID NO:91), DOM4-119 (SEQ ID NO:92), DOM4-120 (SEQ ID NO:93), DOM4-121 (SEQ ID NO:94), DOM4-122 (SEQ ID NO:95), DOM4-122-1 (SEQ ID NO:96), DOM4-122-2 (SEQ ID NO:97), DOM4-122-3 (SEQ ID NO:98), DOM4-122-4 (SEQ ID NO:99), DOM4-122-5 (SEQ ID NO:1100), DOM4-122-6 (SEQ ID NO:1101), DOM4-122-7 (SEQ ID NO:102), DOM4-122-8 (SEQ ID NO:103), DOM4-122-9 (SEQ ID NO:104), DOM4-122-10 (SEQ ID NO:105), DOM4-122-11 (SEQ ID NO:106), DOM4-122-12 (SEQ ID NO:107), DOM4-122-13 (SEQ ID NO:108), DOM4-122-14 (SEQ ID NO:109), DOM4-122-15 (SEQ ID NO:110), DOM4-122-16 (SEQ ID NO:111), DOM4-122-17 (SEQ ID NO:112), DOM4-122-18 (SEQ ID NO:113), DOM4-122-19 (SEQ ID NO:114), DOM4-122-20 (SEQ ID NO:115), DOM4-122-21 (SEQ ID NO:116), DOM4-122-22 (SEQ ID NO:117), DOM4-122-25 (SEQ ID NO:118), DOM4-122-26 (SEQ ID NO:119), DOM4-122-27 (SEQ ID NO:120), DOM4-122-28 (SEQ ID NO:121), DOM4-122-29 (SEQ ID NO:122), DOM4-122-30 (SEQ ID NO:123), DOM4-122-31 (SEQ ID NO:124), DOM4-122-32 (SEQ ID NO:125), DOM4-122-33 (SEQ ID NO:126), DOM4-122-34 (SEQ ID NO:127), DOM4-122-35 (SEQ ID NO:128), DOM4-122-36 (SEQ ID NO:129), DOM4-122-37 (SEQ ID NO:130), DOM4-122-38 (SEQ ID NO:131), DOM4-122-39 (SEQ ID NO:132), DOM4-122-40 (SEQ ID NO:133), DOM4-122-41 (SEQ ID NO:134), DOM4-122-42 (SEQ ID NO:135), DOM4-122-43 (SEQ ID NO:136), DOM4-122-44 (SEQ ID NO:137), DOM4-122-45 (SEQ ID NO:138), DOM4-122-46 (SEQ ID NO:139), DOM4-122-47 (SEQ ID NO:140), DOM4-122-48 (SEQ ID NO:141), DOM4-122-49 (SEQ ID NO:142), DOM4-122-50 (SEQ ID NO:143), DOM4-122-51 (SEQ ID NO:144), DOM4-122-52 (SEQ ID NO:145), DOM4-122-54 (SEQ ID NO:146), DOM4-122-55 (SEQ ID NO:147), DOM4-122-56 (SEQ ID NO:148), DOM4-122-57 (SEQ ID NO:149), DOM4-122-58 (SEQ ID NO:150), DOM4-122-59 (SEQ ID NO:151), DOM4-122-60 (SEQ ID NO:152), DOM4-122-61 (SEQ ID NO:153), DOM4-122-62 (SEQ ID NO:154), DOM4-122-63 (SEQ ID NO:155), DOM4-122-64 (SEQ ID NO:156), DOM4-122-65 (SEQ ID NO:157), DOM4-122-66 (SEQ ID NO:158), DOM4-122-67 (SEQ ID NO:159), DOM4-122-68 (SEQ ID NO:160), DOM4-122-69 (SEQ ID NO:161), DOM4-122-70 (SEQ ID NO:162), DOM4-122-71 (SEQ ID NO:163), DOM4-122-72 (SEQ ID NO:164), DOM4-122-73 (SEQ ID NO:165), DOM4-123 (SEQ ID NO:166), DOM4-124 (SEQ ID NO:167) DOM4-125 (SEQ ID NO:168), DOM4-126 (SEQ ID NO:169), DOM4-127 (SEQ ID NO:170), DOM4-128 (SEQ ID NO:171), DOM4-129 (SEQ ID NO:172), DOM4-129-1 (SEQ ID NO:173), DOM4-129-2 (SEQ ID NO:174), DOM4-129-3 (SEQ ID NO:175), DOM4-129-4 (SEQ ID NO:176), DOM4-129-5 (SEQ ID NO:177), DOM4-129-6 (SEQ ID NO:178), DOM4-129-7 (SEQ ID NO:179), DOM4-129-8 (SEQ ID NO:180), DOM4-129-9 (SEQ ID NO:181), DOM4-129-10 (SEQ ID NO:182), DOM4-129-11 (SEQ ID NO:183), DOM4-129-12 (SEQ ID NO:184), DOM4-129-13 (SEQ ID NO:185), DOM4-129-14 (SEQ ID NO:186), DOM4-129-15 (SEQ ID NO:187), DOM4-129-16 (SEQ ID NO:188), DOM4-129-17 (SEQ ID NO:189), DOM4-129-18 (SEQ ID NO:190), DOM4-129-19 (SEQ ID NO:191), DOM4-129-20 (SEQ ID NO:192), DOM4-129-21 (SEQ ID NO:193), DOM4-129-22 (SEQ ID NO:194), DOM4-129-23 (SEQ ID NO:195), DOM4-129-24 (SEQ ID NO:196), DOM4-129-25 (SEQ ID NO:197), DOM4-129-26 (SEQ ID NO:198), DOM4-129-27 (SEQ ID NO:199), DOM4-129-28 (SEQ ID NO:200), DOM4-129-29 (SEQ ID NO:201), DOM4-129-31 (SEQ ID NO:202), DOM4-129-32 (SEQ ID NO:203), DOM4-129-33 (SEQ ID NO:204), DOM4-129-34 (SEQ ID NO:205), DOM4-129-35 (SEQ ID NO:206), DOM4-129-37 (SEQ ID NO:207), DOM4-129-38 (SEQ ID NO:208), DOM4-129-39 (SEQ ID NO:209), DOM4-129-40 (SEQ ID NO:210), DOM4-129-41 (SEQ ID NO:211), DOM4-129-42 (SEQ ID NO:212), DOM4-129-43 (SEQ ID NO:213), DOM4-129-44 (SEQ ID NO:214), DOM4-130 (SEQ ID NO:215), DOM4-130-1 (SEQ ID NO:216), DOM4-130-2 (SEQ ID NO:217), DOM4-130-3 (SEQ ID NO:218), DOM4-130-4 (SEQ ID NO:219), DOM4-130-5 (SEQ ID NO:220), DOM4-130-6 (SEQ ID NO:221), DOM4-130-7 (SEQ ID NO:222), DOM4-130-8 (SEQ ID NO:223), DOM4-130-9 (SEQ ID NO:224), DOM4-130-10 (SEQ ID NO:225), DOM4-130-11 (SEQ ID NO:226), DOM4-130-12 (SEQ ID NO:227), DOM4-130-13 (SEQ ID NO:228), DOM4-130-14 (SEQ ID NO:229), DOM4-130-15 (SEQ ID NO:230), DOM4-130-16 (SEQ ID NO:231), DOM4-130-17 (SEQ ID NO:232), DOM4-130-18 (SEQ ID NO:233), DOM4-130-19 (SEQ ID NO:234), DOM4-130-20 (SEQ ID NO:235), DOM4-130-21 (SEQ ID NO:236), DOM4-130-22 (SEQ ID NO:237), DOM4-130-23 (SEQ ID NO:238), DOM4-130-24 (SEQ ID NO:239), DOM4-130-25 (SEQ ID NO:240), DOM4-130-26 (SEQ ID NO:241), DOM4-130-27 (SEQ ID NO:242), DOM4-130-28 (SEQ ID NO:243), DOM4-130-31 (SEQ ID NO:244), DOM4-130-32 (SEQ ID NO:245), DOM4-130-33 (SEQ ID NO:246), DOM4-130-34 (SEQ ID NO:247), DOM4-130-35 (SEQ ID NO:248), DOM4-130-36 (SEQ ID NO:249), DOM4-130-37 (SEQ ID NO:250), DOM4-130-38 (SEQ ID NO:251), DOM4-130-39 (SEQ ID NO:252), DOM4-130-40 (SEQ ID NO:253), DOM4-130-41 (SEQ ID NO:254), DOM4-130-42 (SEQ ID NO:255), DOM4-130-43 (SEQ ID NO:256), DOM4-130-44 (SEQ ID NO:257), DOM4-130-45 (SEQ ID NO:258), DOM4-130-46 (SEQ ID NO:259), DOM4-130-47 (SEQ ID NO:260), DOM4-130-48 (SEQ ID NO:261), DOM4-130-49 (SEQ ID NO:262), DOM4-130-50 (SEQ ID NO:263), DOM4-130-51 (SEQ ID NO:264), DOM4-130-52 (SEQ ID NO:265), DOM4-130-53 (SEQ ID NO:266), DOM4-130-54 (SEQ ID NO:267), DOM4-130-55 (SEQ ID NO:268), DOM4-130-56 (SEQ ID NO:269), DOM4-130-57 (SEQ ID NO:270), DOM4-130-58 (SEQ ID NO:271), DOM4-130-59 (SEQ ID NO:272), DOM4-130-60 (SEQ ID NO:273), DOM4-130-61 (SEQ ID NO:274), DOM4-130-62 (SEQ ID NO:275), DOM4-130-63 (SEQ ID NO:276), DOM4-130-64 (SEQ ID NO:277), DOM4-130-65 (SEQ ID NO:278), DOM4-130-66 (SEQ ID NO:279), DOM4-130-67 (SEQ ID NO:280), DOM4-130-68 (SEQ ID NO:281), DOM4-130-69 (SEQ ID NO:282), DOM4-130-70 (SEQ ID NO:283), DOM4-130-71 (SEQ ID NO:284), DOM4-130-72 (SEQ ID NO:285), DOM4-130-73 (SEQ ID NO:286), DOM4-130-74 (SEQ ID NO:287), DOM4-130-75 (SEQ ID NO:288), DOM4-130-76 (SEQ ID NO:289), DOM4-130-77 (SEQ ID NO:290), DOM4-130-78 (SEQ ID NO:291), DOM4-130-79 (SEQ ID NO:292), DOM4-130-80 (SEQ ID NO:293), DOM4-130-81 (SEQ ID NO:294), DOM4-130-82 (SEQ ID NO:295), DOM4-130-83 (SEQ ID NO:296), DOM4-130-84 (SEQ ID NO:297), DOM4-130-85 (SEQ ID NO:298), DOM4-130-86 (SEQ ID NO:299), DOM4-130-87 (SEQ ID NO:300), DOM4-130-88 (SEQ ID NO:301), DOM4-130-89 (SEQ ID NO:302), DOM4-130-90 (SEQ ID NO:303), DOM4-130-91 (SEQ ID NO:304), DOM4-130-92 (SEQ ID NO:305), DOM4-130-93 (SEQ ID NO:306), DOM4-130-94 (SEQ ID NO:307), DOM4-130-95 (SEQ ID NO:308), DOM4-130-96 (SEQ ID NO:309), DOM4-130-97 (SEQ ID NO:310), DOM4-130-98 (SEQ ID NO:311), DOM4-130-99 (SEQ ID NO:312), DOM4-130-100 (SEQ ID NO:313), DOM4-130-101 (SEQ ID NO:314), DOM4-130-102 (SEQ ID NO:315), DOM4-130-103 (SEQ ID NO:316), DOM4-130-104 (SEQ ID NO:317), DOM4-130-105 (SEQ ID NO:318), DOM4-130-106 (SEQ ID NO:319), DOM4-130-107 (SEQ ID NO:320), DOM4-130-108 (SEQ ID NO:321), DOM4-130-109 (SEQ ID NO:322), DOM4-130-110 (SEQ ID NO:323), DOM4-130-111 (SEQ ID NO:324), DOM4-130-112 (SEQ ID NO:325), DOM4-130-113 (SEQ ID NO:326), DOM4-130-114 (SEQ ID NO:327), DOM4-130-115 (SEQ ID NO:328), DOM4-130-116 (SEQ ID NO:329), DOM4-130-117 (SEQ ID NO:330), DOM4-130-118 (SEQ ID NO:331), DOM4-130-119 (SEQ ID NO:332), DOM4-130-120 (SEQ ID NO:333), DOM4-130-121 (SEQ ID NO:334), DOM4-130-122 (SEQ ID NO:335), DOM4-130-123 (SEQ ID NO:336), DOM4-130-124 (SEQ ID NO:337), DOM4-130-125 (SEQ ID NO:338), DOM4-130-126 (SEQ ID NO:339), DOM4-130-127 (SEQ ID NO:340), DOM4-130-128 (SEQ ID NO:341), DOM4-130-129 (SEQ ID NO:342), DOM4-130-130 (SEQ ID NO:343), DOM4-130-131 (SEQ ID NO:344), DOM4-130-132 (SEQ ID NO:345), DOM4-130-133 (SEQ ID NO:346), DOM4-131 (SEQ ID NO:347), DOM4-132 (SEQ ID NO:348), and DOM4-133 (SEQ ID NO:349).

[0135] In other embodiments, the antagonist of IL-1R1 comprises a dAb that has binding specificity for IL-1R1 and comprises the CDRs of any of the foregoing amino acid sequences.

Antibodies and Antibody Portions that Bind a Polypeptide that Enhances Serum Half-Life

[0136] As described herein, in some embodiments, the antagonist of IL-1R1 comprises a moiety that binds a polypeptide that enhances serum half-life (e.g., serum albumin, neonatal Fc receptor). The antibody or antigen-binding fragment that has binding specificity for polypeptide that enhances serum half-life generally has binding specificity for a polypeptide form an animal to which the antagonist of IL-1R1 will be administered. Preferably, the antibody or antigen-binding fragment has binding specificity for human serum albumin or human neonatal Fc receptor. However, veterinary applications are contemplated and the antibody or antigen-binding fragment can have binding specificity for a polypeptide that enhances serum half-life from a desired animal, for example serum albumin from dog, cat, horse, cow, chicken, sheep, pig, goat, deer, mink, and the like. In some embodiments the antibody or antigen-binding fragment has binding specificity for a polypeptide that enhances serum half-life from more than one species. Such antibodies or antigen-binding fragment provide the advantage of allowing preclinical and clinical studies to be designed and executed using the same antagonist of IL-1R1, and obviate the need to conduct preclinical studies with a suitable surrogate antagonist of IL-1R1.

[0137] Suitable antibodies and antigen-binding fragments of antibodies that bind a polypeptide that enhances serum half-life can have the features and properties described in detail herein with respect to antibodies and antigen-binding portions thereof that bind IL-1R1, and can be prepared using any suitable method. For example, antibodies and antigen-binding fragments thereof that bind a polypeptide that enhances serum half-life (e.g., serum albumin, neonatal Fc receptor) be prepared by immunization and/or screening using a selected a polypeptide that enhances serum half-life (e.g., serum albumin, neonatal Fc receptor).

[0138] In certain embodiments, the antagonist of IL-1R1 does not contain a mouse, rat and/or rabbit antibody that binds serum albumin or antigen-binding fragment of such an antibody.

[0139] The antibody or antigen-binding fragment can bind serum albumin with any desired affinity, on rate and off rate. The affinity (KD), on rate (Kₒₙ or kₐ) and off rate (K_{off} or k_{d}) can be selected to obtain a desired serum half-life for a particular drug. For example, it may be desirable to obtain a maximal serum half-life for treating a chronic inflammation or a chronic inflammatory disorder, while a shorter half-life may be desirable for a diagnostic applications or for treating acute inflammation or an acute disorder. Generally, a fast on rate and a fast or moderate off rate for binding to serum albumin is preferred. Antagonists of IL-1R1 that comprise an antibody or antigen-binding fragment thereof that binds serum albumin with these characteristics will quickly bind serum albumin after being administered, and will dissociate and rebind serum albumin rapidly. These characteristics will reduce rapid clearance of the antagonist of IL-1R1 (e.g., through the kidneys) but still provide efficient delivery and access to the drug target.

[0140] The antigen-binding fragment that binds serum albumin (e.g., dAb) generally binds with a KD of about 1 nM to about 500 μM. In some embodiments, the antigen-binding fragment binds serum albumin with a KD (KD=K_{off} (kd)/Kₒₙ (ka)) of about 10 to about 100 nM, or about 100 nM to about 500 nM, or about 500 nM to about 5 mM, as determined by surface plasmon resonance (e.g., using a BIACORE instrument). In particular embodiments, the drug conjugate, noncovalent drug conjugate or drug fusion comprises and antigen-binding fragment of an antibody (e.g., a dAb) that binds serum albumin (e.g., human serum albumin) with a KD of about 50 nM, or about 70 nM, or about 100 nM, or about 150 nM or about 200 mM. The improved pharmacokinetic properties (e.g., prolonged t1/2β, increased AUC) of drug conjugates, noncovalent drug conjugates and drug fusions described herein may correlate with the affinity of the antigen-binding fragment that binds serum albumin. Accordingly, drug conjugates, noncovalent drug conjugates and drug fusions that have improved pharmacokinetic properties can generally be prepared using an antigen-binding fragment that binds serum albumin (e.g., human serum albumin) with high affinity (e.g., KD of about 500 nM or less, about 250 nM or less, about 100 nM or less, about 50 nM or less, about 10 nM or less, or about 1 nM or less, or about 100 pM or less).

[0141] Preferably, the drug that is conjugated or fused to the antigen-binding fragment that binds serum albumin, binds to its target (the drug target) with an affinity (KD) that is stronger than the affinity of the antigen-binding fragment for serum albumin and/or a K_{off} (kd) that is faster that the K_{off} of the antigen binding fragment for serum albumin, as measured by surface plasmon resonance (e.g., using a BIACORE instrument). For example, the drug can bind its target with an affinity that is about 1 to about 100000, or about 100 to about 100000, or about 1000 to about 100000, or about 10000 to about 100000 times stronger than the affinity of antigen-binding fragment that binds SA for SA. For example, the antigen-binding fragment of the antibody that binds SA can bind with an affinity of about 10 μM, while the drug binds its target with an affinity of about 100 pM.

[0142] In particular embodiments, the antigen-binding fragment of an antibody that binds serum albumin is a dAb that binds human serum albumin. For example, a V_{κ} dAb having an amino acid sequence selected from the group consisting of DOM7h-2 (SEQ ID NO:732), DOM7h-3 (SEQ ID NO:733), DOM7h-4 (SEQ ID NO:734), DOM7h-6 (SEQ ID NO:735), DOM7h-1 (SEQ ID NO:736), DOM7h-7 (SEQ ID NO:737), DOM7h-8 (SEQ ID NO:746), DOM7r-13 (SEQ ID NO:747), and DOM7r-14 (SEQ ID NO:748), or a V_{H} dAb having an amino acid sequence selected from the group consisting of DOM7h-22 (DOM7h-22 (SEQ ID NO:739), DOM7h-23 (SEQ ID NO:740), DOM7h-24 (SEQ ID NO:741), DOM7h-25 (SEQ ID NO:742), DOM7h-26 (SEQ ID NO:743), DOM7h-21 (SEQ ID NO:744), and DOM7h-27 (SEQ ID NO:745). In other embodiments, the antigen-binding fragment of an antibody that binds serum albumin is a dAb that binds human serum albumin and comprises the CDRs of any of the foregoing amino acid sequences.

[0143] In other embodiments, the antigen-binding fragment of an antibody that binds serum albumin is a dAb that binds human serum albumin and comprises an amino acid sequence that has at least about 80%, or at least about 85%, or at least about 90%, or at least about 95%, or at least about 96%, or at least about 97%, or at least about 98%, or at least about 99% amino acid sequence identity with DOM7m-16 (SEQ ID NO:723), DOM7m-12 (SEQ ID NO:724), DOM7m-26 (SEQ ID NO:725), DOM7r-1 (SEQ ID NO:726), DOM7r-3 (SEQ ID NO:727), DOM7r-4 (SEQ ID NO:728), DOM7r-5 (SEQ ID NO:729), DOM7r-7 (SEQ ID NO:730), DOM7r-8 (SEQ ID NO:731), DOM7h-2 (SEQ ID NO:732), DOM7h-3 (SEQ ID NO:733), DOM7h-4 (SEQ ID NO:734), DOM7h-6 (SEQ ID NO:735), DOM7h-1 (SEQ ID NO:736), DOM7h-7 (SEQ ID NO:737), DOM7h-22 (SEQ ID NO:739), DOM7h-23 (SEQ ID NO:740), DOM7h-24 (SEQ ID NO:741), DOM7h-25 (SEQ ID NO:742), DOM7h-26 (SEQ ID NO:743), DOM7h-21 (SEQ ID NO:744), DOM7h-27 (SEQ ID NO:745), DOM7h-8 (SEQ ID NO:746), DOM7r-13 (SEQ ID NO:747), DOM7r-14 (SEQ ID NO:748), DOM7r-15 (SEQ ID NO:749), DOM7r-16 (SEQ ID NO:750), DOM7r-17 (SEQ ID NO:751), DOM7r-18 (SEQ ID NO:752), DOM7r-19 (SEQ ID NO:753), DOM7r-20 (SEQ ID NO:754), DOM7r-21 (SEQ ID NO:755), DOM7r-22 (SEQ ID NO:756), DOM7r-23 (SEQ ID NO:757), DOM7r-24 (SEQ ID NO:758), DOM7r-25 (SEQ ID NO:759), DOM7r-26 (SEQ ID NO:760), DOM7r-27 (SEQ ID NO:761), DOM7r-28 (SEQ ID NO:762), DOM7r-29 (SEQ ID NO:763), DOM7r-30 (SEQ ID NO:764), DOM7r-31 (SEQ ID NO:765), DOM7r-32 (SEQ ID NO:766), DOM7r-33 (SEQ ID NO:767), Sequence A (SEQ ID NO:768), Sequence B (SEQ ID NO:769), Sequence C (SEQ ID NO:770), Sequence D (SEQ ID NO:771), Sequence E (SEQ ID NO:772), Sequence F (SEQ ID NO:773), Sequence G (SEQ ID NO:774), Sequence H (SEQ ID NO:775), Sequence I (SEQ ID NO:776), Sequence J (SEQ ID NO:777), Sequence K (SEQ ID NO:778), Sequence L (SEQ ID NO:779), Sequence M (SEQ ID NO:780), Sequence N (SEQ ID NO:781), Sequence O (SEQ ID NO:782), Sequence P (SEQ ID NO:783), and Sequence Q (SEQ ID NO:784).

[0144] Amino acid sequence identity is preferably determined using a suitable sequence alignment algorithm and default parameters, such as BLAST P (Karlin and Altschul, Proc. Natl. Acad. Sci. USA 87(6):2264-2268 (1990)).

### Antagonist of IL-1R1 Formats

[0145] Antagonist of IL-1R1 moieties (e.g., IL-1ra or a functional variant thereof, dAb) can be formatted into a variety of suitable structures for use in the invention. For example, as described in detail herein, an antagonist of IL-1R1 moiety (e.g., a dAb that binds IL-1R1 and inhibits a function of IL-1R1) can be formatted as a conjugate and protein, polypeptide, and peptide antagonists of IL-1R1 moieties can be formatted as a fusion protein. A protein, polypeptide or peptide antagonist of IL-1R1 (e.g., a dAb that binds IL-1R1 and inhibits a function of IL-1R1) can be formatted as a mono or multispecific antibody or antibody fragment, or into a mono or multispecific non-antibody structure. Suitable formats include, any suitable polypeptide structure in which IL-1ra, a functional variant of IL-1ra, an antibody variable domain or one or more of the CDRs thereof can be incorporated, so as to confer binding specificity for IL-1R1 on the structure. A variety of suitable antibody formats are known in the art, such as, IgG-like formats, chimeric antibodies, humanized antibodies, human antibodies, single chain antibodies, bispecific antibodies, antibody heavy chains, antibody light chains, homodimers and heterodimers of antibody heavy chains and/or light chains, antigen-binding fragments of any of the foregoing (e.g., a Fv fragment (e.g., single chain Fv (scFv), a disulfide bonded Fv), a Fab fragment, a Fab′ fragment, a F(ab′)₂ fragment), a single variable domain (e.g., V_{H}, V_{L}, V_{HH}), a dAb, and modified versions of any of the foregoing (e.g., modified by the covalent attachment of polyalkylene glycol (e.g., polyethylene glycol, polypropylene glycol, polybutylene glycol) or other suitable polymer). See, PCT/GB03/002804, filed Jun. 30, 2003, which designated the United States, (WO 2004/081026) regarding PEGylated single variable domains and dAbs, suitable methods for preparing same, increased in vivo half life of the PEGylated single variable domains and dAb monomers and multimers, suitable PEGs, preferred hydrodynamic sizes of PEGs, and preferred hydrodynamic sizes of PEGylated single variable domains and dAb monomers and multimers. The entire teaching of PCT/GB03/002804 (WO 2004/081026), including the portions referred to above, are incorporated herein by reference.

[0146] The antagonist of IL-1R1 can be formatted as a dimer, trimer or polymer of a desired dAb monomer that binds IL-1R1, for example, using a suitable linker such as (Gly₄Ser)ₙ, where n=from 1 to 8, e.g., 1, 2, 3, 4, 5, 6, 7 or 8. If desired, a protein, polypeptide or peptide antagonist of IL-1R1 moiety (including dAb monomers, dimers and trimers, IL-1ra and functional variants thereof) can be linked to an antibody Fc region. For example, a protein, polypeptide or peptide antagonist can be linked to a human IgG (Fc region) comprising one or both of C_{H}2 and C_{H}3 domains, and optionally a hinge region, and optionally containing mutations that reduce the ability of the Fc region to fix complement and/or bind Fc receptors. Such mutations are well-known in the art and described, for example, in GB 2,209,757 B (Winter et al.), WO 89/07142 (Morrison et al.), and WO 94/29351 (Morgan et al.), the teachings of these documents with respect to amino acid mutations in Fc regions that reduce Fc receptor binding and/or the ability to fix complement are incorporated herein by reference.

[0147] Protein, polypeptide or peptide antagonists of IL-1R1 moieties (e.g., dAb monomers, IL-1ra or functional variants thereof) can also be combined and/or formatted into non-antibody multivalent complexes that comprise two or more copies of the same antagonist of IL-1R1 moiety or two or more different antagonist of IL-1R1 moieties, and which bind cells expressing IL-1R1 with superior avidity. For example natural bacterial receptors such as SpA can been used as scaffolds for the grafting of CDRs to generate non-antibody formats that bind specifically to one or more epitopes of IL-1R1. Details of this procedure are described in U.S. Pat. No. 5,831,012. Other suitable scaffolds include those based on fibronectin and affibodies. Details of suitable procedures are described in WO 98/58965. Other suitable scaffolds include lipocallin and CTLA4, as described in van den Beuken et al., J. Mol. Biol. 310:591-601 (2001), and scaffolds such as those described in WO 00/69907 (Medical Research Council), which are based for example on the ring structure of bacterial GroEL or other chaperone polypeptides. Protein scaffolds may be combined; for example, CDRs may be grafted on to a CTLA4 scaffold and used together with immunoglobulin V_{H} or V_{L} domains to form an antagonist of IL-1R1 suitable for use in the invention. Likewise, fibronectin, lipocallin and other scaffolds may be combined

[0148] A variety of suitable methods for preparing any desired format are known in the art. For example, antibody chains and formats (e.g., IgG-like formats, chimeric antibodies, humanized antibodies, human antibodies, single chain antibodies, bispecific antibodies, antibody heavy chains, antibody light chains, homodimers and heterodimers of antibody heavy chains and/or light chains) can be prepared by expression of suitable expression constructs and/or culture of suitable cells (e.g., hybridomas, heterohybridomas, recombinant host cells containing recombinant constructs encoding the format). Further, formats such as antigen-binding fragments of antibodies or antibody chains (e.g., a Fv fragment (e.g., single chain Fv (scFv), a disulfide bonded Fv), a Fab fragment, a Fab′ fragment, a F(ab′)₂ fragment), can be prepared by expression of suitable expression constructs or by enzymatic digestion of antibodies, for example using papain or pepsin.

[0149] A protein, polypeptide or peptide antagonist of IL-1R1 moiety can be formatted as a “dual specific ligand” or a “multispecific ligand,” as described in WO 03/002609, the entire teachings of which are incorporated herein by reference. Dual specific ligand comprises immunoglobulin single variable domains that have different binding specificities. Such dual specific ligands can comprise combinations of heavy and light chain domains. For example, the dual specific ligand may comprise a V_{H} domain and a V_{L} domain, which may be linked together in the form of an scFv (e.g., using a suitable linker such as Gly₄Ser), or formatted into a bispecific antibody or antigen-binding fragment thereof (e.g. F(ab′)₂ fragment). The dual specific ligands do not comprise complementary V_{H}/V_{L} pairs which form a conventional two chain antibody antigen-binding site that binds antigen or epitope co-operatively. Instead, the dual format ligands comprise a V_{H}/V_{L} complementary pair, wherein the V domains have different binding specificities. A dual specific ligand can comprise one or more C_{H} or C_{L} domains if desired. A hinge region domain may also be included if desired. Such combinations of domains may, for example, mimic natural antibodies, such as IgG or IgM, or fragments thereof, such as Fv, scFv, Fab or F(ab′)₂ molecules. Other structures, such as a single arm of an IgG molecule comprising V_{H}, V_{L}, C_{H}1 and C_{L} domains, are envisaged. Preferably, the dual specific ligand comprises only two variable domains although several such ligands may be incorporated together into the same protein, for example two such ligands can be incorporated into an IgG or a multimeric immunoglobulin, such as IgM. Alternatively, a plurality of dual specific ligands can be combined to form a multimer. For example, two different dual specific ligands can be combined to create a tetra-specific molecule. It will be appreciated by one skilled in the art that the light and heavy variable regions of a dual-specific ligand can be on the same polypeptide chain, or alternatively, on different polypeptide chains. In the case that the variable regions are on different polypeptide chains, then they may be linked via a linker, generally a flexible linker (such as a polypeptide chain), a chemical linking group, or any other method known in the art.

[0150] A multispecific ligand possess more than one epitope binding specificity. Generally, the multi-specific ligand comprises two or more epitope binding domains, such as dAbs or non-antibody protein domain comprising a binding site for an epitope, e.g., an affibody, an SpA domain, an LDL receptor class A domain, an EGF domain, an avimer. Multispecific ligands can be formatted further as described herein.

[0151] In some embodiments, the antagonist of IL-1R1 is an IgG-like format. Such formats have the conventional four chain structure of an IgG molecule (2 heavy chains and two light chains), in which one or more of the variable regions (V_{H} and or V_{L}) have been replaced with a dAb or single variable domain that has binding specificity for IL-1R1. Preferably, each of the variable regions (2 V_{H} regions and 2 V_{L} regions) is replaced with a dAb or single variable domain. The dAb(s) or single variable domain(s) that are included in an IgG-like format can have the same specificity or different specificities. In some embodiments, the IgG-like format is tetravalent and can have one, two, three or four specificities. For example, the IgG-like format can be monospecific and comprises 4 dAbs that have the same specificity (e.g., for the same epitope on IL-1R1); bispecific and comprises 3 dAbs that have the same specificity and another dAb that has a different specificity; bispecific and comprise two dAbs that have the same specificity and two dAbs that have a common but different specificity; trispecific and comprises first and second dAbs that have the same specificity, a third dAbs with a different specificity and a fourth dAb with a different specificity from the first, second and third dAbs; or tetraspecific and comprise four dAbs that each have a different specificity. Antigen-binding fragments of IgG-like formats (e.g., Fab, F(ab′)₂, Fab′, Fv, scFv) can be prepared. Preferably, the IgG-like formats or antigen-binding fragments thereof do not crosslink IL-1R1.

### Half-Life Extended Formats

[0152] An antagonist of IL-1R1 or antagonist of IL-1R1 moiety (e.g., dAb monomer, dimer or multimer, dual specific format, multi-specific format) can be formatted to extend its in vivo serum half life. Increased in vivo half-life is useful in in vivo applications of polypeptides, such as immunoglobulins, especially antibodies and most especially antibody fragments of small size such as dAbs. Such fragments (Fvs, disulphide bonded Fvs, Fabs, scFvs, dAbs) are rapidly cleared from the body, which can severely limit clinical applications.

[0153] An antagonist of IL-1R1 or antagonist of IL-1R1 moiety can be formatted to have a larger hydrodynamic size, for example, by attachment of a polyalkyleneglycol group (e.g. polyethyleneglycol (PEG) group), serum albumin, transferrin, transferrin receptor or at least the transferrin-binding portion thereof, an antibody Fc region, or by conjugation to an antibody domain. In some embodiments, the antagonist if IL-1R1 (e.g., ligand, dAb monomer) is PEGylated. Preferably the PEGylated antagonist IL-1R1 (e.g., ligand, dAb monomer) binds IL-1R1 with substantially the same affinity as the same antagonist that is not PEGylated. For example, the antagonist of IL-1R1 can be a PEGylated dAb monomer that binds IL-1R1, wherein the PEGylated dAb monomer binds IL-1R1 with an affinity that differs from the affinity of dAb in unPEGylated form by no more than a factor of about 1000, preferably no more than a factor of about 100, more preferably no more than a factor of about 10, or with affinity substantially unchanged affinity relative to the unPEGylated form.

[0154] Examples of suitable albumin, albumin fragments or albumin variants for use in an antagonists of IL-1R1 are described in WO 2005/077042A2, which is incorporated herein by reference in its entirety. In particular, the following albumin, albumin fragments or albumin variants can be used in the present invention:
[0155] SEQ ID NO:1 (as disclosed in WO 2005/077042A2, this sequence being explicitly incorporated into the present disclosure by reference);
[0156] Albumin fragment or variant comprising or consisting of amino acids 1-387 of SEQ ID NO:1 in WO 2005/077042A2;
[0157] Albumin, or fragment or variant thereof, comprising an amino acid sequence selected from the group consisting of: (a) amino acids 54 to 61 of SEQ ID NO:1 in WO 2005/077042A2; (b) amino acids 76 to 89 of SEQ ID NO:1 in WO 2005/077042A2; (c) amino acids 92 to 100 of SEQ ID NO:1 in WO 2005/077042A2; (d) amino acids 170 to 176 of SEQ ID NO:1 in WO 2005/077042A2; (e) amino acids 247 to 252 of SEQ ID NO:1 in WO 2005/077042A2; (f) amino acids 266 to 277 of SEQ ID NO:1 in WO 2005/077042A2; (g) amino acids 280 to 288 of SEQ ID NO:1 in WO 2005/077042A2; (h) amino acids 362 to 368 of SEQ ID NO:1 in WO 2005/077042A2; (i) amino acids 439 to 447 of SEQ ID NO:1 in WO 2005/077042A2; amino acids 462 to 475 of SEQ ID NO:1 in WO 2005/077042A2; (j) amino acids 478 to 486 of SEQ ID NO:1 in WO 2005/077042A2; and (l) amino acids 560 to 566 of SEQ ID NO: 1 in WO 2005/077042A2.

[0158] Further examples of suitable albumin, fragments and analogs for use in an antagonist of IL-1R1 according to the invention are described in WO 03/076567A2, which is incorporated herein by reference in its entirety. In particular, the following albumin, fragments or variants can be used in the present invention:
[0159] Human serum albumin as described in WO 03/076567A2, eg, in FIG. 3 (this sequence information being explicitly incorporated into the present disclosure by reference);
[0160] Human serum albumin (HA) consisting of a single non-glycosylated polypeptide chain of 585 amino acids with a formula molecular weight of 66,500 (See, Meloun, et al., FEBS Letters 58:136 (1975); Behrens, et al., Fed. Proc. 34:591 (1975); Lawn, et al., Nucleic Acids Research 9:6102-6114 (1981); Minghetti, et al., J. Biol. Chem. 261:6747 (1986));
[0161] A polymorphic variant or analog or fragment of albumin as described in Weitkamp, et al., Ann. Hum. Genet. 37:219 (1973);
[0162] An albumin fragment or variant as described in EP 322094, eg, HA(1-373., HA(1-388), HA(1-389), HA(1-369), and HA(1-419) and fragments between 1-369 and 1-419;
[0163] An albumin fragment or variant as described in EP 399666, eg, HA(1-177) and HA(1-200) and fragments between HA(1-X), where X is any number from 178 to 199.

[0164] Where a (one or more) half-life extending moiety (e.g., albumin, transferrin and fragments and analogues thereof) is used in the antagonist of IL-1R1, it can be conjugated using any suitable method, such as, by direct fusion to an antagonist of IL-1R1 moiety, for example by using a single nucleotide construct that encodes a fusion protein, wherein the fusion protein is encoded as a single polypeptide chain with the half-life extending moiety located N- or C-terminally to the antagonist of IL-1R1 moiety. Alternatively, conjugation can be achieved by using a peptide linker between moieties, e.g., a peptide linker as described in WO 03/076567A2 or WO 2004/003019 (these linker disclosures being incorporated by reference in the present disclosure to provide examples for use in the present invention).

[0165] Small antagonists of IL-1R1 or antagonist of IL-1R1 moieties, such as a dAb monomer, can be formatted as a larger antigen-binding fragment of an antibody or as and antibody (e.g., formatted as a Fab, Fab′, F(ab)₂, F(ab′)₂, IgG, scFv). The hydrodynamic size of an antagonist of IL-1R1 (e.g., dAb monomer) and its serum half-life can also be increased by conjugating or linking the antagonist of IL-1R1 to a binding domain (e.g., antibody or antibody fragment) that binds an antigen or epitope that increases half-live in vivo, as described herein. For example, the antagonist of IL-1R1 (e.g., dAb monomer) can be conjugated or linked to an anti-serum albumin or anti-neonatal Fc receptor antibody or antibody fragment, e.g. an anti-SA or anti-neonatal Fc receptor dAb, Fab, Fab′ or scFv, or to an anti-SA affibody or anti-neonatal Fc receptor affibody.

[0166] Typically, a polypeptide that enhances serum half-life in vivo is a polypeptide which occurs naturally in vivo and which resists degradation or removal by endogenous mechanisms which remove unwanted material from the organism (e.g., human). For example, a polypeptide that enhances serum half-life in vivo can be selected from proteins from the extracellular matrix, proteins found in blood, proteins found at the blood brain barrier or in neural tissue, proteins localized to the kidney, liver, lung, heart, skin or bone, stress proteins, disease-specific proteins, or proteins involved in Fc transport.

[0167] Suitable polypeptides that enhance serum half-life in vivo include, for example, transferrin receptor specific ligand-neuropharmaceutical agent fusion proteins (see U.S. Pat. No. 5,977,307, the teachings of which are incorporated herein by reference), brain capillary endothelial cell receptor, transferrin, transferrin receptor (e.g., soluble transferrin receptor), insulin, insulin-like growth factor 1 (IGF 1) receptor, insulin-like growth factor 2 (IGF 2) receptor, insulin receptor, blood coagulation factor X, α1-antitrypsin and HNF 1α. Suitable polypeptides that enhance serum half-life also include alpha-1 glycoprotein (orosomucoid; AAG), alpha-1 antichymotrypsin (ACT), alpha-1 microglobulin (protein HC; AIM), antithrombin III (AT III), apolipoprotein A-1 (Apo A-1), apolipoprotein B (Apo B), ceruloplasmin (Cp), complement component C3 (C3), complement component C4 (C4), C1 esterase inhibitor (C1 INH), C-reactive protein (CRP), ferritin (FER), hemopexin (HPX), lipoprotein(a) (Lp(a)), mannose-binding protein (MBP), myoglobin (Myo), prealbumin (transthyretin; PAL), retinol-binding protein (RBP), and rheumatoid factor (RF).

[0168] Suitable proteins from the extracellular matrix include, for example, collagens, laminins, integrins and fibronectin. Collagens are the major proteins of the extracellular matrix. About 15 types of collagen molecules are currently known, found in different parts of the body, e.g. type I collagen (accounting for 90% of body collagen) found in bone, skin, tendon, ligaments, cornea, internal organs or type II collagen found in cartilage, vertebral disc, notochord, and vitreous humor of the eye.

[0169] Suitable proteins from the blood include, for example, plasma proteins (e.g., fibrin, α-2 macroglobulin, serum albumin, fibrinogen (e.g., fibrinogen A, fibrinogen B), serum amyloid protein A, haptoglobin, profilin, ubiquitin, uteroglobulin and β-2-microglobulin), enzymes and enzyme inhibitors (e.g., plasminogen, lysozyme, cystatin C, alpha-1-antitrypsin and pancreatic trypsin inhibitor), proteins of the immune system, such as immunoglobulin proteins (e.g., IgA, IgD, IgE, IgG, IgM, immunoglobulin light chains (kappa/lambda)), transport proteins (e.g., retinol binding protein, α-1 microglobulin), defensins (e.g., beta-defensin 1, neutrophil defensin 1, neutrophil defensin 2 and neutrophil defensin 3) and the like.

[0170] Suitable proteins found at the blood brain barrier or in neural tissue include, for example, melanocortin receptor, myelin, ascorbate transporter and the like.

[0171] Suitable polypeptides that enhances serum half-life in vivo also include proteins localized to the kidney (e.g., polycystin, type IV collagen, organic anion transporter K1, Heymann's antigen), proteins localized to the liver (e.g., alcohol dehydrogenase, G250), proteins localized to the lung (e.g., secretory component, which binds IgA), proteins localized to the heart (e.g., HSP 27, which is associated with dilated cardiomyopathy), proteins localized to the skin (e.g., keratin), bone specific proteins such as morphogenic proteins (BMPs), which are a subset of the transforming growth factor β superfamily of proteins that demonstrate osteogenic activity (e.g., BMP-2, BMP-4, BMP-5, BMP-6, BMP-7, BMP-8), tumor specific proteins (e.g., trophoblast antigen, herceptin receptor, oestrogen receptor, cathepsins (e.g., cathepsin B, which can be found in liver and spleen)).

[0172] Suitable disease-specific proteins include, for example, antigens expressed only on activated T-cells, including LAG-3 (lymphocyte activation gene), osteoprotegerin ligand (OPGL; see Nature 402, 304-309 (1999)), OX40 (a member of the TNF receptor family, expressed on activated T cells and specifically up-regulated in human T cell leukemia virus type-I (HTLV-I)-producing cells; see Immunol. 165 (1):263-70 (2000)). Suitable disease-specific proteins also include, for example, metalloproteases (associated with arthritis/cancers) including CG6512 Drosophila, human paraplegin, human FtsH, human AFG3L2, murine ftsH; and angiogenic growth factors, including acidic fibroblast growth factor (FGF-1), basic fibroblast growth factor (FGF-2), vascular endothelial growth factor/vascular permeability factor (VEGF/VPF), transforming growth factor-α (TGF α), tumor necrosis factor-alpha (TNF-α), angiogenin, interleukin-3 (IL-3), interleukin-8 (IL-8), platelet-derived endothelial growth factor (PD-ECGF), placental growth factor (P1GF), midkine platelet-derived growth factor-BB (PDGF), and fractalkine.

[0173] Suitable polypeptides that enhance serum half-life in vivo also include stress proteins such as heat shock proteins (HSPs). HSPs are normally found intracellularly. When they are found extracellularly, it is an indicator that a cell has died and spilled out its contents. This unprogrammed cell death (necrosis) occurs when as a result of trauma, disease or injury, extracellular HSPs trigger a response from the immune system. Binding to extracellular HSP can result in localizing the compositions of the invention to a disease site.

[0174] Suitable proteins involved in Fc transport include, for example, Brambell receptor (also known as FcRB). This Fc receptor has two functions, both of which are potentially useful for delivery. The functions are (1) transport of IgG from mother to child across the placenta (2) protection of IgG from degradation thereby prolonging its serum half-life. It is thought that the receptor recycles IgG from endosomes. (See, Holliger et al, Nat Biotechnol 15(7):632-6 (1997).)

[0175] Methods for pharmacokinetic analysis and determination of half-life will be familiar to those skilled in the art. Details may be found in Kenneth, A et al: Chemical Stability of Pharmaceuticals: A Handbook for Pharmacists and in Peters et al, Pharmacokinetc analysis: A Practical Approach (1996). Reference is also made to “Pharmacokinetics”, M Gibaldi & D Perron, published by Marcel Dekker, 2^{nd} Rev. ex edition (1982), which describes pharmacokinetic parameters such as t alpha and t beta half lives and area under the curve (AUC).

[0176] Particular examples of half-life extended formats are described further below.

### Antagonist of IL-1R1 Fusion Proteins

[0177] Antagonist of IL-1R1 fusion proteins suitable for use in the invention are fusion proteins that comprise a continuous polypeptide chain, said chain comprising an antigen-binding fragment of an antibody that binds a polypeptide that extends serum half-life (e.g., serum albumin) as a first moiety, linked to a second moiety (antagonist of IL-1R1 moiety) that is a polypeptide antagonist of IL-1R1. The first and second moieties can be directly bonded to each other through a peptide bond, or linked through a suitable amino acid, or peptide or polypeptide linker. Additional moieties (e.g., third, fourth) and/or linker sequences can be present as appropriate. The first moiety can be in an N-terminal location, C-terminal location or internal relative to the second moiety (i.e., the polypeptide antagonist of IL-1R1). The moieties can occur on the continuous polypeptide chain in any desired order. In certain embodiments, each moiety can be present in more than one copy. For example, the antagonist of IL-1R1 fusion can comprise two or more first moieties each comprising an antigen-binding fragment of an antibody that binds a polypeptide that enhances serum half-life (e.g., a V_{H} that binds human serum albumin and a V_{L} that bind human serum albumin or two or more V_{H}s or V_{L}s that bind human serum albumin).

[0178] In certain embodiments, the fusion protein is a continuous polypeptide chain that has the formula (amino-terminal to carboxy-terminal):

a-(P)n2-b-(X)n1-c-(O)n3-d or a-(O)n3-b-(X)n1-c-(P)n2-d

[0179] wherein X is a polypeptide antagonist of IL-1R1 moiety;

[0180] P and Q are each independently a polypeptide binding moiety that contains a binding site that has binding specificity for a polypeptide that enhances serum half-life in vivo;

[0181] a, b, c and d are each independently absent or one to about 100 amino acid residues;

[0182] n1, n2 and n3 represent the number of X, P or Q moieties present, respectively;

[0183] n1 is one to about 10;

[0184] n2 is zero to about 10; and

[0185] n3 is zero to about 10, with the proviso that both n2 and n3 are not zero.

[0186] In some embodiments, when n1 and n2 are both one and n3 is zero, X does not comprise an antibody chain or a fragment of an antibody chain.

[0187] In some embodiments, n2 is one, two, three, four, five or six, and n3 is zero. In other embodiments, n3 is one, two, three, four, five or six, and n2 is zero. In other embodiments, n1, n2 and n3 are each one.

[0188] In certain embodiments, X does not comprises an antibody chain or a fragment of an antibody chain.

[0189] In preferred embodiments, P and Q are each independently a polypeptide binding moiety that has binding specificity for serum albumin.

[0190] In some embodiments, the antagonist of IL-1R1 fusion protein is a continuous polypeptide chain that has the formula:

a-(X)ₙ₁-b-(Y)ₙ₂-c-(Z)ₙ₃-d or a-(Z)ₙ₃-b-(Y)ₙ₂-c-(X)ₙ₁-d;

wherein X is a polypeptide that has binding specificity for IL-1R1;

[0191] Y is a single chain antigen-binding fragment of an antibody that has binding specificity for serum albumin;

[0192] Z is a polypeptide drug that has binding specificity for a second target;

[0193] a, b, c and d are each independently absent or one to about 100 amino acid residues;

[0194] n1 is one to about 10;

[0195] n2 is one to about 10; and

[0196] n3 is zero to about 10.

[0197] In some embodiments, when n1 and n2 are both one and n3 is zero, X does not comprise an antibody chain or a fragment of an antibody chain.

[0198] In one embodiment, neither X nor Z comprises an antibody chain or a fragment of an antibody chain. In one embodiment, nil is one, n3 is one and n2 is two, three, four, five, six, seven, eight or nine. Preferably, Y is an immunoglobulin heavy chain variable domain (V_{H}, V_{HH}) that has binding specificity for serum albumin, or an immunoglobulin light chain variable domain (V_{L}) that has binding specificity for serum albumin. More preferably, Y is a dAb (e.g., a V_{H}, V_{Λ}) that binds human serum albumin. In a particular embodiment, X or Z is human IL-1ra or a functional variant of human IL-1ra.

[0199] In certain embodiments, Y comprises an amino acid sequence selected from the group consisting of DOM7h-2 (SEQ ID NO:732), DOM7h-3 (SEQ ID NO:733), DOM7h-4 (SEQ ID NO:734), DOM7h-6 (SEQ ID NO:735), DOM7h-1 (SEQ ID NO:736), DOM7h-7 (SEQ ID NO:737), DOM7h-8 (SEQ ID NO:746), DOM7r-13 (SEQ ID NO:747), and DOM7r-14 (SEQ ID NO:748). In other embodiments, Y comprises an amino acid sequence selected from the group consisting of DOM7h-22 (SEQ ID NO:739), DOM7h-23 (SEQ ID NO:740), DOM7h-24 (SEQ ID NO:741), DOM7h-25 (SEQ ID NO:742), DOM7h-26 (SEQ ID NO:743), DOM7h-21 (SEQ ID NO:744), and DOM7h-27 (SEQ ID NO:745).

[0200] In certain embodiments, X and Z are independently a binding domain that has a binding site with binding specificity for IL-1R1. In some embodiments X and/or Z independently comprise an amino acid sequence selected from the group consisting of DOM4-122-23 (SEQ ID NO:1), DOM4-122-24 (SEQ ID NO:2), DOM4-130-30 (SEQ ID NO:3), DOM4-130-46 (SEQ ID NO:4), DOM4-130-51 (SEQ ID NO:5), DOM4-130-53 (SEQ ID NO:6), DOM4-130-54 (SEQ ID NO:7), DOM4-1 (SEQ ID NO:8), DOM4-2 (SEQ ID NO:9), DOM4-3 (SEQ ID NO:10), DOM4-4 (SEQ ID NO:11), DOM4-5 (SEQ ID NO:12), DOM4-6 (SEQ ID NO:13), DOM4-7 (SEQ ID NO:14), DOM4-8 (SEQ ID NO:15), DOM4-9 (SEQ ID NO:16), DOM4-10 (SEQ ID NO:17), DOM4-11 (SEQ ID NO:18), DOM4-12 (SEQ ID NO:19), DOM4-13 (SEQ ID NO:20), DOM4-14 (SEQ ID NO:21), DOM4-15 (SEQ ID NO:22), DOM4-20 (SEQ ID NO:23), DOM4-21 (SEQ ID NO:24), DOM4-22 (SEQ ID NO:25), DOM4-23 (SEQ ID NO:26), DOM4-25 (SEQ ID NO:27), DOM4-26 (SEQ ID NO:28), DOM4-27 (SEQ ID NO:29), DOM4-28 (SEQ ID NO:30), DOM4-29 (SEQ ID NO:31), DOM4-31 (SEQ ID NO:32), DOM4-32 (SEQ ID NO:33), DOM4-33 (SEQ ID NO:34), DOM4-34 (SEQ ID NO:35), DOM4-36 (SEQ ID NO:36), DOM4-37 (SEQ ID NO:37), DOM4-38 (SEQ ID NO:38), DOM4-39 (SEQ ID NO:39), DOM4-40 (SEQ ID NO:40), DOM4-41 (SEQ ID NO:41), DOM4-42 (SEQ ID NO:42), DOM4-44 (SEQ ID NO:43), DOM4-45 (SEQ ID NO:44), DOM4-46 (SEQ ID NO:45), DOM4-49 (SEQ ID NO:46), DOM4-50 (SEQ ID NO:47), DOM4-74 (SEQ ID NO:48), DOM4-75 (SEQ ID NO:49), DOM4-76 (SEQ ID NO:50), DOM4-78 (SEQ ID NO:51), DOM4-79 (SEQ ID NO:52), DOM4-80 (SEQ ID NO:53), DOM4-81 (SEQ ID NO:54), DOM4-82 (SEQ ID NO:55), DOM4-83 (SEQ ID NO:56), DOM4-84 (SEQ ID NO:57), DOM4-85 (SEQ ID NO:58), DOM4-86 (SEQ ID NO:59), DOM4-87 (SEQ ID NO:60), DOM4-88 (SEQ ID NO:61), DOM4-89 (SEQ ID NO:62), DOM4-90 (SEQ ID NO:63), DOM4-91 (SEQ ID NO:64), DOM4-92 (SEQ ID NO:65), DOM4-93 (SEQ ID NO:66), DOM4-94 (SEQ ID NO:67), DOM4-95 (SEQ ID NO:68), DOM4-96 (SEQ ID NO:69), DOM4-97 (SEQ ID NO:70), DOM4-98 (SEQ ID NO:71), DOM4-99 (SEQ ID NO:72), DOM4-100 (SEQ ID NO:73), DOM4-101 (SEQ ID NO:74), DOM4-102 (SEQ ID NO:75), DOM4-103 (SEQ ID NO:76), DOM4-104 (SEQ ID NO:77), DOM4-105 (SEQ ID NO:78), DOM4-106 (SEQ ID NO:79), DOM4-107 (SEQ ID NO:80), DOM4-108 (SEQ ID NO:81), DOM4-109 (SEQ ID NO:82), DOM4-110 (SEQ ID NO:83), DOM4-111 (SEQ ID NO:84), DOM4-112 (SEQ ID NO:85), DOM4-113 (SEQ ID NO:86), DOM4-114 (SEQ ID NO:87), DOM4-115 (SEQ ID NO:88), DOM4-116 (SEQ ID NO:89), DOM4-117 (SEQ ID NO:90), DOM4-118 (SEQ ID NO:91), DOM4-119 (SEQ ID NO:92), DOM4-120 (SEQ ID NO:93), DOM4-121 (SEQ ID NO:94), DOM4-122 (SEQ ID NO:95), DOM4-122-1 (SEQ ID NO:96), DOM4-122-2 (SEQ ID NO:97), DOM4-122-3 (SEQ ID NO:98), DOM4-122-4 (SEQ ID NO:99), DOM4-122-5 (SEQ ID NO:100), DOM4-122-6 (SEQ ID NO:101), DOM4-122-7 (SEQ ID NO:102), DOM4-122-8 (SEQ ID NO:103), DOM4-122-9 (SEQ ID NO:104), DOM4-122-10 (SEQ ID NO:105), DOM4-122-11 (SEQ ID NO:106), DOM4-122-12 (SEQ ID NO:107), DOM4-122-13 (SEQ ID NO:108), DOM4-122-14 (SEQ ID NO:109), DOM4-122-15 (SEQ ID NO:110), DOM4-122-16 (SEQ ID NO:111), DOM4-122-17 (SEQ ID NO:112), DOM4-122-18 (SEQ ID NO:113), DOM4-122-19 (SEQ ID NO:114), DOM4-122-20 (SEQ ID NO:115), DOM4-122-21 (SEQ ID NO:116), DOM4-122-22 (SEQ ID NO:117), DOM4-122-25 (SEQ ID NO:118), DOM4-122-26 (SEQ ID NO:119), DOM4-122-27 (SEQ ID NO:120), DOM4-122-28 (SEQ ID NO:121), DOM4-122-29 (SEQ ID NO:122), DOM4-122-30 (SEQ ID NO:123), DOM4-122-31 (SEQ ID NO:124), DOM4-122-32 (SEQ ID NO:125), DOM4-122-33 (SEQ ID NO:126), DOM4-122-34 (SEQ ID NO:127), DOM4-122-35 (SEQ ID NO:128), DOM4-122-36 (SEQ ID NO:129), DOM4-122-37 (SEQ ID NO:130), DOM4-122-38 (SEQ ID NO:131), DOM4-122-39 (SEQ ID NO:132), DOM4-122-40 (SEQ ID NO:133), DOM4-122-41 (SEQ ID NO:134), DOM4-122-42 (SEQ ID NO:135), DOM4-122-43 (SEQ ID NO:136), DOM4-122-44 (SEQ ID NO:137), DOM4-122-45 (SEQ ID NO:138), DOM4-122-46 (SEQ ID NO:139), DOM4-122-47 (SEQ ID NO:140), DOM4-122-48 (SEQ ID NO:141), DOM4-122-49 (SEQ ID NO:142), DOM4-122-50 (SEQ ID NO:143), DOM4-122-51 (SEQ ID NO:144), DOM4-122-52 (SEQ ID NO:145), DOM4-122-54 (SEQ ID NO:146), DOM4-122-55 (SEQ ID NO:147), DOM4-122-56 (SEQ ID NO:148), DOM4-122-57 (SEQ ID NO:149), DOM4-122-58 (SEQ ID NO:150), DOM4-122-59 (SEQ ID NO:151), DOM4-122-60 (SEQ ID NO:152), DOM4-122-61 (SEQ ID NO:153), DOM4-122-62 (SEQ ID NO:154), DOM4-122-63 (SEQ ID NO:155), DOM4-122-64 (SEQ ID NO:156), DOM4-122-65 (SEQ ID NO:157), DOM4-122-66 (SEQ ID NO:158), DOM4-122-67 (SEQ ID NO:159), DOM4-122-68 (SEQ ID NO:160), DOM4-122-69 (SEQ ID NO:161), DOM4-122-70 (SEQ ID NO:162), DOM4-122-71 (SEQ ID NO:163), DOM4-122-72 (SEQ ID NO:164), DOM4-122-73 (SEQ ID NO:165), DOM4-123 (SEQ ID NO:166), DOM4-124 (SEQ ID NO:167) DOM4-125 (SEQ ID NO:168), DOM4-126 (SEQ ID NO:169), DOM4-127 (SEQ ID NO:170), DOM4-128 (SEQ ID NO:171), DOM4-129 (SEQ ID NO:172), DOM4-129-1 (SEQ ID NO:173), DOM4-129-2 (SEQ ID NO:174), DOM4-129-3 (SEQ ID NO:175), DOM4-129-4 (SEQ ID NO:176), DOM4-129-5 (SEQ ID NO:177), DOM4-129-6 (SEQ ID NO:178), DOM4-129-7 (SEQ ID NO:179), DOM4-129-8 (SEQ ID NO:180), DOM4-129-9 (SEQ ID NO:181), DOM4-129-10 (SEQ ID NO:182), DOM4-129-11 (SEQ ID NO:183), DOM4-129-12 (SEQ ID NO:184), DOM4-129-13 (SEQ ID NO:185), DOM4-129-14 (SEQ ID NO:186), DOM4-129-15 (SEQ ID NO:187), DOM4-129-16 (SEQ ID NO:188), DOM4-129-17 (SEQ ID NO:189), DOM4-129-18 (SEQ ID NO:190), DOM4-129-19 (SEQ ID NO:191), DOM4-129-20 (SEQ ID NO:192), DOM4-129-21 (SEQ ID NO:193), DOM4-129-22 (SEQ ID NO:194), DOM4-129-23 (SEQ ID NO:195), DOM4-129-24 (SEQ ID NO:196), DOM4-129-25 (SEQ ID NO:197), DOM4-129-26 (SEQ ID NO:198), DOM4-129-27 (SEQ ID NO:199), DOM4-129-28 (SEQ ID NO:200), DOM4-129-29 (SEQ ID NO:201), DOM4-129-31 (SEQ ID NO:202), DOM4-129-32 (SEQ ID NO:203), DOM4-129-33 (SEQ ID NO:204), DOM4-129-34 (SEQ ID NO:205), DOM4-129-35 (SEQ ID NO:206), DOM4-129-37 (SEQ ID NO:207), DOM4-129-38 (SEQ ID NO:208), DOM4-129-39 (SEQ ID NO:209), DOM4-129-40 (SEQ ID NO:210), DOM4-129-41 (SEQ ID NO:211), DOM4-129-42 (SEQ ID NO:212), DOM4-129-43 (SEQ ID NO:213), DOM4-129-44 (SEQ ID NO:214), DOM4-130 (SEQ ID NO:215), DOM4-130-1 (SEQ ID NO:216), DOM4-130-2 (SEQ ID NO:217), DOM4-130-3 (SEQ ID NO:218), DOM4-130-4 (SEQ ID NO:219), DOM4-130-5 (SEQ ID NO:220), DOM4-130-6 (SEQ ID NO:221), DOM4-130-7 (SEQ ID NO:222), DOM4-130-8 (SEQ ID NO:223), DOM4-130-9 (SEQ ID NO:224), DOM4-130-10 (SEQ ID NO:225), DOM4-130-11 (SEQ ID NO:226), DOM4-130-12 (SEQ ID NO:227), DOM4-130-13 (SEQ ID NO:228), DOM4-130-14 (SEQ ID NO:229), DOM4-130-15 (SEQ ID NO:230), DOM4-130-16 (SEQ ID NO:231), DOM4-130-17 (SEQ ID NO:232), DOM4-130-18 (SEQ ID NO:233), DOM4-130-19 (SEQ ID NO:234), DOM4-130-20 (SEQ ID NO:235), DOM4-130-21 (SEQ ID NO:236), DOM4-130-22 (SEQ ID NO:237), DOM4-130-23 (SEQ ID NO:238), DOM4-130-24 (SEQ ID NO:239), DOM4-130-25 (SEQ ID NO:240), DOM4-130-26 (SEQ ID NO:241), DOM4-130-27 (SEQ ID NO:242), DOM4-130-28 (SEQ ID NO:243), DOM4-130-31 (SEQ ID NO:244), DOM4-130-32 (SEQ ID NO:245), DOM4-130-33 (SEQ ID NO:246), DOM4-130-34 (SEQ ID NO:247), DOM4-130-35 (SEQ ID NO:248), DOM4-130-36 (SEQ ID NO:249), DOM4-130-37 (SEQ ID NO:250), DOM4-130-38 (SEQ ID NO:251), DOM4-130-39 (SEQ ID NO:252), DOM4-130-40 (SEQ ID NO:253), DOM4-130-41 (SEQ ID NO:254), DOM4-130-42 (SEQ ID NO:255), DOM4-130-43 (SEQ ID NO:256), DOM4-130-44 (SEQ ID NO:257), DOM4-130-45 (SEQ ID NO:258), DOM4-130-46 (SEQ ID NO:259), DOM4-130-47 (SEQ ID NO:260), DOM4-130-48 (SEQ ID NO:261), DOM4-130-49 (SEQ ID NO:262), DOM4-130-50 (SEQ ID NO:263), DOM4-130-51 (SEQ ID NO:264), DOM4-130-52 (SEQ ID NO:265), DOM4-130-53 (SEQ ID NO:266), DOM4-130-54 (SEQ ID NO:267), DOM4-130-55 (SEQ ID NO:268), DOM4-130-56 (SEQ ID NO:269), DOM4-130-57 (SEQ ID NO:270), DOM4-130-58 (SEQ ID NO:271), DOM4-130-59 (SEQ ID NO:272), DOM4-130-60 (SEQ ID NO:273), DOM4-130-61 (SEQ ID NO:274), DOM4-130-62 (SEQ ID NO:275), DOM4-130-63 (SEQ ID NO:276), DOM4-130-64 (SEQ ID NO:277), DOM4-130-65 (SEQ ID NO:278), DOM4-130-66 (SEQ ID NO:279), DOM4-130-67 (SEQ ID NO:280), DOM4-130-68 (SEQ ID NO:281), DOM4-130-69 (SEQ ID NO:282), DOM4-130-70 (SEQ ID NO:283), DOM4-130-71 (SEQ ID NO:284), DOM4-130-72 (SEQ ID NO:285), DOM4-130-73 (SEQ ID NO:286), DOM4-130-74 (SEQ ID NO:287), DOM4-130-75 (SEQ ID NO:288), DOM4-130-76 (SEQ ID NO:289), DOM4-130-77 (SEQ ID NO:290), DOM4-130-78 (SEQ ID NO:291), DOM4-130-79 (SEQ ID NO:292), DOM4-130-80 (SEQ ID NO:293), DOM4-130-81 (SEQ ID NO:294), DOM4-130-82 (SEQ ID NO:295), DOM4-130-83 (SEQ ID NO:296), DOM4-130-84 (SEQ ID NO:297), DOM4-130-85 (SEQ ID NO:298), DOM4-130-86 (SEQ ID NO:299), DOM4-130-87 (SEQ ID NO:300), DOM4-130-88 (SEQ ID NO:301), DOM4-130-89 (SEQ ID NO:302), DOM4-130-90 (SEQ ID NO:303), DOM4-130-91 (SEQ ID NO:304), DOM4-130-92 (SEQ ID NO:305), DOM4-130-93 (SEQ ID NO:306), DOM4-130-94 (SEQ ID NO:307), DOM4-130-95 (SEQ ID NO:308), DOM4-130-96 (SEQ ID NO:309), DOM4-130-97 (SEQ ID NO:310), DOM4-130-98 (SEQ ID NO:311), DOM4-130-99 (SEQ ID NO:312), DOM4-130-100 (SEQ ID NO:313), DOM4-130-101 (SEQ ID NO:314), DOM4-130-102 (SEQ ID NO:315), DOM4-130-103 (SEQ ID NO:316), DOM4-130-104 (SEQ ID NO:317), DOM4-130-105 (SEQ ID NO:318), DOM4-130-106 (SEQ ID NO:319), DOM4-130-107 (SEQ ID NO:320), DOM4-130-108 (SEQ ID NO:321), DOM4-130-109 (SEQ ID NO:322), DOM4-130-110 (SEQ ID NO:323), DOM4-130-111 (SEQ ID NO:324), DOM4-130-112 (SEQ ID NO:325), DOM4-130-113 (SEQ ID NO:326), DOM4-130-114 (SEQ ID NO:327), DOM4-130-115 (SEQ ID NO:328), DOM4-130-116 (SEQ ID NO:329), DOM4-130-117 (SEQ ID NO:330), DOM4-130-118 (SEQ ID NO:331), DOM4-130-119 (SEQ ID NO:332), DOM4-130-120 (SEQ ID NO:333), DOM4-130-121 (SEQ ID NO:334), DOM4-130-122 (SEQ ID NO:335), DOM4-130-123 (SEQ ID NO:336), DOM4-130-124 (SEQ ID NO:337), DOM4-130-125 (SEQ ID NO:338), DOM4-130-126 (SEQ ID NO:339), DOM4-130-127 (SEQ ID NO:340), DOM4-130-128 (SEQ ID NO:341), DOM4-130-129 (SEQ ID NO:342), DOM4-130-130 (SEQ ID NO:343), DOM4-130-131 (SEQ ID NO:344), DOM4-130-132 (SEQ ID NO:345), DOM4-130-133 (SEQ ID NO:346), DOM4-131 (SEQ ID NO:347), DOM4-132 (SEQ ID NO:348), and DOM4-133 (SEQ ID NO:349).

[0201] In other embodiments, the drug fusion comprises moieties X′ and Y′, wherein X′ is a polypeptide antagonist of IL-1R1, with the proviso that X′ does not comprise an antibody chain or a fragment of an antibody chain; and Y′ is a single chain antigen-binding fragment of an antibody that has binding specificity for serum albumin. Preferably, Y′ is an immunoglobulin heavy chain variable domain (V_{H}, V_{HH}) that has binding specificity for serum albumin, or an immunoglobulin light chain variable domain (V_{L}) that has binding specificity for serum albumin. More preferably, Y′ is a dAb (e.g., a V_{H}, V_{κ} or V_{λ}) that binds human serum albumin. X′ can be located amino terminally to Y′, or Y′ can be located amino terminally to X′. In some embodiments, X′ and Y′ are separated by an amino acid, or by a peptide or polypeptide linker that comprises from two to about 100 amino acids. In a particular embodiment, X′ is human IL-1ra or a functional variant of human IL-1ra.

[0202] In other embodiments, X′ is a binding domain that has a binding site with binding specificity for IL-1R1. In particular embodiments the antagonist of IL-1R1 fusion comprises a dAb that binds serum albumin and human IL-1ra (e.g., SEQ ID NO:786). Preferably, the dAb binds human serum albumin and comprises human framework regions. In some embodiments, X′ comprise an amino acid sequence selected from the group consisting of DOM4-122-23 (SEQ ID NO:1), DOM4-122-24 (SEQ ID NO:2), DOM4-130-30 (SEQ ID NO:3), DOM4-130-46 (SEQ ID NO:4), DOM4-130-51 (SEQ ID NO:5), DOM4-130-53 (SEQ ID NO:6), DOM4-130-54 (SEQ ID NO:7), DOM4-1 (SEQ ID NO:8), DOM4-2 (SEQ ID NO:9), DOM4-3 (SEQ ID NO:10), DOM4-4 (SEQ ID NO:11), DOM4-5 (SEQ ID NO:12), DOM4-6 (SEQ ID NO:13), DOM4-7 (SEQ ID NO:14), DOM4-8 (SEQ ID NO:15), DOM4-9 (SEQ ID NO:16), DOM4-10 (SEQ ID NO:17), DOM4-11 (SEQ ID NO:18), DOM4-12 (SEQ ID NO:19), DOM4-13 (SEQ ID NO:20), DOM4-14 (SEQ ID NO:21), DOM4-15 (SEQ ID NO:22), DOM4-20 (SEQ ID NO:23), DOM4-21 (SEQ ID NO:24), DOM4-22 (SEQ ID NO:25), DOM4-23 (SEQ ID NO:26), DOM4-25 (SEQ ID NO:27), DOM4-26 (SEQ ID NO:28), DOM4-27 (SEQ ID NO:29), DOM4-28 (SEQ ID NO:30), DOM4-29 (SEQ ID NO:31), DOM4-31 (SEQ ID NO:32), DOM4-32 (SEQ ID NO:33), DOM4-33 (SEQ ID NO:34), DOM4-34 (SEQ ID NO:35), DOM4-36 (SEQ ID NO:36), DOM4-37 (SEQ ID NO:37), DOM4-38 (SEQ ID NO:38), DOM4-39 (SEQ ID NO:39), DOM4-40 (SEQ ID NO:40), DOM4-41 (SEQ ID NO:41), DOM4-42 (SEQ ID NO:42), DOM4-44 (SEQ ID NO:43), DOM4-45 (SEQ ID NO:44), DOM4-46 (SEQ ID NO:45), DOM4-49 (SEQ ID NO:46), DOM4-50 (SEQ ID NO:47), DOM4-74 (SEQ ID NO:48), DOM4-75 (SEQ ID NO:49), DOM4-76 (SEQ ID NO:50), DOM4-78 (SEQ ID NO:51), DOM4-79 (SEQ ID NO:52), DOM4-80 (SEQ ID NO:53), DOM4-81 (SEQ ID NO:54), DOM4-82 (SEQ ID NO:55), DOM4-83 (SEQ ID NO:56), DOM4-84 (SEQ ID NO:57), DOM4-85 (SEQ ID NO:58), DOM4-86 (SEQ ID NO:59), DOM4-87 (SEQ ID NO:60), DOM4-88 (SEQ ID NO:61), DOM4-89 (SEQ ID NO:62), DOM4-90 (SEQ ID NO:63), DOM4-91 (SEQ ID NO:64), DOM4-92 (SEQ ID NO:65), DOM4-93 (SEQ ID NO:66), DOM4-94 (SEQ ID NO:67), DOM4-95 (SEQ ID NO:68), DOM4-96 (SEQ ID NO:69), DOM4-97 (SEQ ID NO:70), DOM4-98 (SEQ ID NO:71), DOM4-99 (SEQ ID NO:72), DOM4-100 (SEQ ID NO:73), DOM4-101 (SEQ ID NO:74), DOM4-102 (SEQ ID NO:75), DOM4-103 (SEQ ID NO:76), DOM4-104 (SEQ ID NO:77), DOM4-105 (SEQ ID NO:78), DOM4-106 (SEQ ID NO:79), DOM4-107 (SEQ ID NO:80), DOM4-108 (SEQ ID NO:81), DOM4-109 (SEQ ID NO:82), DOM4-110 (SEQ ID NO:83), DOM4-111 (SEQ ID NO:84), DOM4-112 (SEQ ID NO:85), DOM4-113 (SEQ ID NO:86), DOM4-114 (SEQ ID NO:87), DOM4-115 (SEQ ID NO:88), DOM4-116 (SEQ ID NO:89), DOM4-117 (SEQ ID NO:90), DOM4-118 (SEQ ID NO:91), DOM4-119 (SEQ ID NO:92), DOM4-120 (SEQ ID NO:93), DOM4-121 (SEQ ID NO:94), DOM4-122 (SEQ ID NO:95), DOM4-122-1 (SEQ ID NO:96), DOM4-122-2 (SEQ ID NO:97), DOM4-122-3 (SEQ ID NO:98), DOM4-122-4 (SEQ ID NO:99), DOM4-122-5 (SEQ ID NO:100), DOM4-122-6 (SEQ ID NO:101), DOM4-122-7 (SEQ ID NO:102), DOM4-122-8 (SEQ ID NO:103), DOM4-122-9 (SEQ ID NO:104), DOM4-122-10 (SEQ ID NO:105), DOM4-122-11 (SEQ ID NO:106), DOM4-122-12 (SEQ ID NO:107), DOM4-122-13 (SEQ ID NO:108), DOM4-122-14 (SEQ ID NO:109), DOM4-122-15 (SEQ ID NO:110), DOM4-122-16 (SEQ ID NO:111), DOM4-122-17 (SEQ ID NO:112), DOM4-122-18 (SEQ ID NO:113), DOM4-122-19 (SEQ ID NO:114), DOM4-122-20 (SEQ ID NO:115), DOM4-122-21 (SEQ ID NO:116), DOM4-122-22 (SEQ ID NO:117), DOM4-122-25 (SEQ ID NO:118), DOM4-122-26 (SEQ ID NO:119), DOM4-122-27 (SEQ ID NO:120), DOM4-122-28 (SEQ ID NO:121), DOM4-122-29 (SEQ ID NO:122), DOM4-122-30 (SEQ ID NO:123), DOM4-122-31 (SEQ ID NO:124), DOM4-122-32 (SEQ ID NO:125), DOM4-122-33 (SEQ ID NO:126), DOM4-122-34 (SEQ ID NO:127), DOM4-122-35 (SEQ ID NO:128), DOM4-122-36 (SEQ ID NO:129), DOM4-122-37 (SEQ ID NO:130), DOM4-122-38 (SEQ ID NO:131), DOM4-122-39 (SEQ ID NO:132), DOM4-122-40 (SEQ ID NO:133), DOM4-122-41 (SEQ ID NO:134), DOM4-122-42 (SEQ ID NO:135), DOM4-122-43 (SEQ ID NO:136), DOM4-122-44 (SEQ ID NO:137), DOM4-122-45 (SEQ ID NO:138), DOM4-122-46 (SEQ ID NO:139), DOM4-122-47 (SEQ ID NO:140), DOM4-122-48 (SEQ ID NO:141), DOM4-122-49 (SEQ ID NO:142), DOM4-122-50 (SEQ ID NO:143), DOM4-122-51 (SEQ ID NO:144), DOM4-122-52 (SEQ ID NO:145), DOM4-122-54 (SEQ ID NO:146), DOM4-122-55 (SEQ ID NO:147), DOM4-122-56 (SEQ ID NO:148), DOM4-122-57 (SEQ ID NO:149), DOM4-122-58 (SEQ ID NO:150), DOM4-122-59 (SEQ ID NO:151), DOM4-122-60 (SEQ ID NO:152), DOM4-122-61 (SEQ ID NO:153), DOM4-122-62 (SEQ ID NO:154), DOM4-122-63 (SEQ ID NO:155), DOM4-122-64 (SEQ ID NO:156), DOM4-122-65 (SEQ ID NO:157), DOM4-122-66 (SEQ ID NO:158), DOM4-122-67 (SEQ ID NO:159), DOM4-122-68 (SEQ ID NO:160), DOM4-122-69 (SEQ ID NO:161), DOM4-122-70 (SEQ ID NO:162), DOM4-122-71 (SEQ ID NO:163), DOM4-122-72 (SEQ ID NO:164), DOM4-122-73 (SEQ ID NO:165), DOM4-123 (SEQ ID NO:166), DOM4-124 (SEQ ID NO:167) DOM4-125 (SEQ ID NO:168), DOM4-126 (SEQ ID NO:169), DOM4-127 (SEQ ID NO:170), DOM4-128 (SEQ ID NO:171), DOM4-129 (SEQ ID NO:172), DOM4-129-1 (SEQ ID NO:173), DOM4-129-2 (SEQ ID NO:174), DOM4-129-3 (SEQ ID NO:175), DOM4-129-4 (SEQ ID NO:176), DOM4-129-5 (SEQ ID NO:177), DOM4-129-6 (SEQ ID NO:178), DOM4-129-7 (SEQ ID NO:179), DOM4-129-8 (SEQ ID NO:180), DOM4-129-9 (SEQ ID NO:181), DOM4-129-10 (SEQ ID NO:182), DOM4-129-11 (SEQ ID NO:183), DOM4-129-12 (SEQ ID NO:184), DOM4-129-13 (SEQ ID NO:185), DOM4-129-14 (SEQ ID NO:186), DOM4-129-15 (SEQ ID NO:187), DOM4-129-16 (SEQ ID NO:188), DOM4-129-17 (SEQ ID NO:189), DOM4-129-18 (SEQ ID NO:190), DOM4-129-19 (SEQ ID NO:191), DOM4-129-20 (SEQ ID NO:192), DOM4-129-21 (SEQ ID NO:193), DOM4-129-22 (SEQ ID NO:194), DOM4-129-23 (SEQ ID NO:195), DOM4-129-24 (SEQ ID NO:196), DOM4-129-25 (SEQ ID NO:197), DOM4-129-26 (SEQ ID NO:198), DOM4-129-27 (SEQ ID NO:199), DOM4-129-28 (SEQ ID NO:200), DOM4-129-29 (SEQ ID NO:201), DOM4-129-31 (SEQ ID NO:202), DOM4-129-32 (SEQ ID NO:203), DOM4-129-33 (SEQ ID NO:204), DOM4-129-34 (SEQ ID NO:205), DOM4-129-35 (SEQ ID NO:206), DOM4-129-37 (SEQ ID NO:207), DOM4-129-38 (SEQ ID NO:208), DOM4-129-39 (SEQ ID NO:209), DOM4-129-40 (SEQ ID NO:210), DOM4-129-41 (SEQ ID NO:211), DOM4-129-42 (SEQ ID NO:212), DOM4-129-43 (SEQ ID NO:213), DOM4-129-44 (SEQ ID NO:214), DOM4-130 (SEQ ID NO:215), DOM4-130-1 (SEQ ID NO:216), DOM4-130-2 (SEQ ID NO:217), DOM4-130-3 (SEQ ID NO:218), DOM4-130-4 (SEQ ID NO:219), DOM4-130-5 (SEQ ID NO:220), DOM4-130-6 (SEQ ID NO:221), DOM4-130-7 (SEQ ID NO:222), DOM4-130-8 (SEQ ID NO:223), DOM4-130-9 (SEQ ID NO:224), DOM4-130-10 (SEQ ID NO:225), DOM4-130-11 (SEQ ID NO:226), DOM4-130-12 (SEQ ID NO:227), DOM4-130-13 (SEQ ID NO:228), DOM4-130-14 (SEQ ID NO:229), DOM4-130-15 (SEQ ID NO:230), DOM4-130-16 (SEQ ID NO:231), DOM4-130-17 (SEQ ID NO:232), DOM4-130-18 (SEQ ID NO:233), DOM4-130-19 (SEQ ID NO:234), DOM4-130-20 (SEQ ID NO:235), DOM4-130-21 (SEQ ID NO:236), DOM4-130-22 (SEQ ID NO:237), DOM4-130-23 (SEQ ID NO:238), DOM4-130-24 (SEQ ID NO:239), DOM4-130-25 (SEQ ID NO:240), DOM4-130-26 (SEQ ID NO:241), DOM4-130-27 (SEQ ID NO:242), DOM4-130-28 (SEQ ID NO:243), DOM4-130-31 (SEQ ID NO:244), DOM4-130-32 (SEQ ID NO:245), DOM4-130-33 (SEQ ID NO:246), DOM4-130-34 (SEQ ID NO:247), DOM4-130-35 (SEQ ID NO:248), DOM4-130-36 (SEQ ID NO:249), DOM4-130-37 (SEQ ID NO:250), DOM4-130-38 (SEQ ID NO:251), DOM4-130-39 (SEQ ID NO:252), DOM4-130-40 (SEQ ID NO:253), DOM4-130-41 (SEQ ID NO:254), DOM4-130-42 (SEQ ID NO:255), DOM4-130-43 (SEQ ID NO:256), DOM4-130-44 (SEQ ID NO:257), DOM4-130-45 (SEQ ID NO:258), DOM4-130-46 (SEQ ID NO:259), DOM4-130-47 (SEQ ID NO:260), DOM4-130-48 (SEQ ID NO:261), DOM4-130-49 (SEQ ID NO:262), DOM4-130-50 (SEQ ID NO:263), DOM4-130-51 (SEQ ID NO:264), DOM4-130-52 (SEQ ID NO:265), DOM4-130-53 (SEQ ID NO:266), DOM4-130-54 (SEQ ID NO:267), DOM4-130-55 (SEQ ID NO:268), DOM4-130-56 (SEQ ID NO:269), DOM4-130-57 (SEQ ID NO:270), DOM4-130-58 (SEQ ID NO:271), DOM4-130-59 (SEQ ID NO:272), DOM4-130-60 (SEQ ID NO:273), DOM4-130-61 (SEQ ID NO:274), DOM4-130-62 (SEQ ID NO:275), DOM4-130-63 (SEQ ID NO:276), DOM4-130-64 (SEQ ID NO:277), DOM4-130-65 (SEQ ID NO:278), DOM4-130-66 (SEQ ID NO:279), DOM4-130-67 (SEQ ID NO:280), DOM4-130-68 (SEQ ID NO:281), DOM4-130-69 (SEQ ID NO:282), DOM4-130-70 (SEQ ID NO:283), DOM4-130-71 (SEQ ID NO:284), DOM4-130-72 (SEQ ID NO:285), DOM4-130-73 (SEQ ID NO:286), DOM4-130-74 (SEQ ID NO:287), DOM4-130-75 (SEQ ID NO:288), DOM4-130-76 (SEQ ID NO:289), DOM4-130-77 (SEQ ID NO:290), DOM4-130-78 (SEQ ID NO:291), DOM4-130-79 (SEQ ID NO:292), DOM4-130-80 (SEQ ID NO:293), DOM4-130-81 (SEQ ID NO:294), DOM4-130-82 (SEQ ID NO:295), DOM4-130-83 (SEQ ID NO:296), DOM4-130-84 (SEQ ID NO:297), DOM4-130-85 (SEQ ID NO:298), DOM4-130-86 (SEQ ID NO:299), DOM4-130-87 (SEQ ID NO:300), DOM4-130-88 (SEQ ID NO:301), DOM4-130-89 (SEQ ID NO:302), DOM4-130-90 (SEQ ID NO:303), DOM4-130-91 (SEQ ID NO:304), DOM4-130-92 (SEQ ID NO:305), DOM4-130-93 (SEQ ID NO:306), DOM4-130-94 (SEQ ID NO:307), DOM4-130-95 (SEQ ID NO:308), DOM4-130-96 (SEQ ID NO:309), DOM4-130-97 (SEQ ID NO:310), DOM4-130-98 (SEQ ID NO:311), DOM4-130-99 (SEQ ID NO:312), DOM4-130-100 (SEQ ID NO:313), DOM4-130-101 (SEQ ID NO:314), DOM4-130-102 (SEQ ID NO:315), DOM4-130-103 (SEQ ID NO:316), DOM4-130-104 (SEQ ID NO:317), DOM4-130-105 (SEQ ID NO:318), DOM4-130-106 (SEQ ID NO:319), DOM4-130-107 (SEQ ID NO:320), DOM4-130-108 (SEQ ID NO:321), DOM4-130-109 (SEQ ID NO:322), DOM4-130-110 (SEQ ID NO:323), DOM4-130-111 (SEQ ID NO:324), DOM4-130-112 (SEQ ID NO:325), DOM4-130-113 (SEQ ID NO:326), DOM4-130-114 (SEQ ID NO:327), DOM4-130-115 (SEQ ID NO:328), DOM4-130-116 (SEQ ID NO:329), DOM4-130-117 (SEQ ID NO:330), DOM4-130-118 (SEQ ID NO:331), DOM4-130-119 (SEQ ID NO:332), DOM4-130-120 (SEQ ID NO:333), DOM4-130-121 (SEQ ID NO:334), DOM4-130-122 (SEQ ID NO:335), DOM4-130-123 (SEQ ID NO:336), DOM4-130-124 (SEQ ID NO:337), DOM4-130-125 (SEQ ID NO:338), DOM4-130-126 (SEQ ID NO:339), DOM4-130-127 (SEQ ID NO:340), DOM4-130-128 (SEQ ID NO:341), DOM4-130-129 (SEQ ID NO:342), DOM4-130-130 (SEQ ID NO:343), DOM4-130-131 (SEQ ID NO:344), DOM4-130-132 (SEQ ID NO:345), DOM4-130-133 (SEQ ID NO:346), DOM4-131 (SEQ ID NO:347), DOM4-132 (SEQ ID NO:348), and DOM4-133 (SEQ ID NO:349).

[0203] In certain embodiments, Y′ comprises an amino acid sequence selected from the group consisting of DOM7h-2 (SEQ ID NO:732), DOM7h-3 (SEQ ID NO:733), DOM7h-4 (SEQ ID NO:734), DOM7h-6 (SEQ ID NO:735), DOM7h-1 (SEQ ID NO:736), DOM7h-7 (SEQ ID NO:737), DOM7h-8 (SEQ ID NO:746), DOM7r-13 (SEQ ID NO:747), and DOM7r-14 (SEQ ID NO:748). In other embodiments, Y′ comprises an amino acid sequence selected from the group consisting of DOM7h-22 (SEQ ID NO:739), DOM7h-23 (SEQ ID NO:740), DOM7h-24 (SEQ ID NO:741), DOM7h-25 (SEQ ID NO:742), DOM7h-26 (SEQ ID NO:743), DOM7h-21 (SEQ ID NO:744), and DOM7h-27 (SEQ ID NO:745).

[0204] In other embodiments, the antagonist of IL-1R1 fusion or IL-1R1 conjugate comprises a functional variant of human IL-1ra that has at least about 80%, or at least about 85%, or at least about 90%, or at least about 95%, or at least about 96%, or at least about 97%, or at least about 98%, or at least about 99% amino acid sequence identity with the mature 152 amino acid form of human IL-1ra and antagonizes human Interleukin-1 type 1 receptor. (See, Eisenberg et al., Nature 343:341-346 (1990).) The IL-1ra variant can comprise one or more additional amino acids (e.g., comprise 153 or 154 or more amino acids).

[0205] In other embodiments, the antagonist of IL-1R1 fusion or IL-1R1 conjugate comprises a dAb that binds human IL-1R1 and inhibits a function of human IL-1 R1, and has an amino acid sequence that has at least about 80%, or at least about 85%, or at least about 90%, or at least about 95%, or at least about 96%, or at least about 97%, or at least about 98%, or at least about 99% amino acid sequence identity with the amino acid sequence of DOM4-122-23 (SEQ ID NO:1), DOM4-122-24 (SEQ ID NO:2), DOM4-130-30 (SEQ ID NO:3), DOM4-130-46 (SEQ ID NO:4), DOM4-130-51 (SEQ ID NO:5), DOM4-130-53 (SEQ ID NO:6), DOM4-130-54 (SEQ ID NO:7), DOM4-1 (SEQ ID NO:8), DOM4-2 (SEQ ID NO:9), DOM4-3 (SEQ ID NO:10), DOM4-4 (SEQ ID NO:11), DOM4-5 (SEQ ID NO:12), DOM4-6 (SEQ ID NO:13), DOM4-7 (SEQ ID NO:14), DOM4-8 (SEQ ID NO:15), DOM4-9 (SEQ ID NO:16), DOM4-10 (SEQ ID NO:17), DOM4-11 (SEQ ID NO:18), DOM4-12 (SEQ ID NO:19), DOM4-13 (SEQ ID NO:20), DOM4-14 (SEQ ID NO:21), DOM4-15 (SEQ ID NO:22), DOM4-20 (SEQ ID NO:23), DOM4-21 (SEQ ID NO:24), DOM4-22 (SEQ ID NO:25), DOM4-23 (SEQ ID NO:26), DOM4-25 (SEQ ID NO:27), DOM4-26 (SEQ ID NO:28), DOM4-27 (SEQ ID NO:29), DOM4-28 (SEQ ID NO:30), DOM4-29 (SEQ ID NO:31), DOM4-31 (SEQ ID NO:32), DOM4-32 (SEQ ID NO:33), DOM4-33 (SEQ ID NO:34), DOM4-34 (SEQ ID NO:35), DOM4-36 (SEQ ID NO:36), DOM4-37 (SEQ ID NO:37), DOM4-38 (SEQ ID NO:38), DOM4-39 (SEQ ID NO:39), DOM4-40 (SEQ ID NO:40), DOM4-41 (SEQ ID NO:41), DOM4-42 (SEQ ID NO:42), DOM4-44 (SEQ ID NO:43), DOM4-45 (SEQ ID NO:44), DOM4-46 (SEQ ID NO:45), DOM4-49 (SEQ ID NO:46), DOM4-50 (SEQ ID NO:47), DOM4-74 (SEQ ID NO:48), DOM4-75 (SEQ ID NO:49), DOM4-76 (SEQ ID NO:50), DOM4-78 (SEQ ID NO:51), DOM4-79 (SEQ ID NO:52), DOM4-80 (SEQ ID NO:53), DOM4-81 (SEQ ID NO:54), DOM4-82 (SEQ ID NO:55), DOM4-83 (SEQ ID NO:56), DOM4-84 (SEQ ID NO:57), DOM4-85 (SEQ ID NO:58), DOM4-86 (SEQ ID NO:59), DOM4-87 (SEQ ID NO:60), DOM4-88 (SEQ ID NO:61), DOM4-89 (SEQ ID NO:62), DOM4-90 (SEQ ID NO:63), DOM4-91 (SEQ ID NO:64), DOM4-92 (SEQ ID NO:65), DOM4-93 (SEQ ID NO:66), DOM4-94 (SEQ ID NO:67), DOM4-95 (SEQ ID NO:68), DOM4-96 (SEQ ID NO:69), DOM4-97 (SEQ ID NO:70), DOM4-98 (SEQ ID NO:71), DOM4-99 (SEQ ID NO:72), DOM4-100 (SEQ ID NO:73), DOM4-101 (SEQ ID NO:74), DOM4-102 (SEQ ID NO:75), DOM4-103 (SEQ ID NO:76), DOM4-104 (SEQ ID NO:77), DOM4-105 (SEQ ID NO:78), DOM4-106 (SEQ ID NO:79), DOM4-107 (SEQ ID NO:80), DOM4-108 (SEQ ID NO:81), DOM4-109 (SEQ ID NO:82), DOM4-110 (SEQ ID NO:83), DOM4-111 (SEQ ID NO:84), DOM4-112 (SEQ ID NO:85), DOM4-113 (SEQ ID NO:86), DOM4-114 (SEQ ID NO:87), DOM4-115 (SEQ ID NO:88), DOM4-116 (SEQ ID NO:89), DOM4-117 (SEQ ID NO:90), DOM4-118 (SEQ ID NO:91), DOM4-119 (SEQ ID NO:92), DOM4-120 (SEQ ID NO:93), DOM4-121 (SEQ ID NO:94), DOM4-122 (SEQ ID NO:95), DOM4-122-1 (SEQ ID NO:96), DOM4-122-2 (SEQ ID NO:97), DOM4-122-3 (SEQ ID NO:98), DOM4-122-4 (SEQ ID NO:99), DOM4-122-5 (SEQ ID NO:100), DOM4-122-6 (SEQ ID NO:101), DOM4-122-7 (SEQ ID NO:102), DOM4-122-8 (SEQ ID NO:103), DOM4-122-9 (SEQ ID NO:104), DOM4-122-10 (SEQ ID NO:105), DOM4-122-11 (SEQ ID NO:106), DOM4-122-12 (SEQ ID NO:107), DOM4-122-13 (SEQ ID NO:108), DOM4-122-14 (SEQ ID NO:109), DOM4-122-15 (SEQ ID NO:110), DOM4-122-16 (SEQ ID NO:111), DOM4-122-17 (SEQ ID NO:112), DOM4-122-18 (SEQ ID NO:113), DOM4-122-19 (SEQ ID NO:114), DOM4-122-20 (SEQ ID NO:115), DOM4-122-21 (SEQ ID NO:116), DOM4-122-22 (SEQ ID NO:117), DOM4-122-25 (SEQ ID NO:118), DOM4-122-26 (SEQ ID NO:119), DOM4-122-27 (SEQ ID NO:120), DOM4-122-28 (SEQ ID NO:121), DOM4-122-29 (SEQ ID NO:122), DOM4-122-30 (SEQ ID NO:123), DOM4-122-31 (SEQ ID NO:124), DOM4-122-32 (SEQ ID NO:125), DOM4-122-33 (SEQ ID NO:126), DOM4-122-34 (SEQ ID NO:127), DOM4-122-35 (SEQ ID NO:128), DOM4-122-36 (SEQ ID NO:129), DOM4-122-37 (SEQ ID NO:130), DOM4-122-38 (SEQ ID NO:131), DOM4-122-39 (SEQ ID NO:132), DOM4-122-40 (SEQ ID NO:133), DOM4-122-41 (SEQ ID NO:134), DOM4-122-42 (SEQ ID NO:135), DOM4-122-43 (SEQ ID NO:136), DOM4-122-44 (SEQ ID NO:137), DOM4-122-45 (SEQ ID NO:138), DOM4-122-46 (SEQ ID NO:139), DOM4-122-47 (SEQ ID NO:140), DOM4-122-48 (SEQ ID NO:141), DOM4-122-49 (SEQ ID NO:142), DOM4-122-50 (SEQ ID NO:143), DOM4-122-51 (SEQ ID NO:144), DOM4-122-52 (SEQ ID NO:145), DOM4-122-54 (SEQ ID NO:146), DOM4-122-55 (SEQ ID NO:147), DOM4-122-56 (SEQ ID NO:148), DOM4-122-57 (SEQ ID NO:149), DOM4-122-58 (SEQ ID NO:150), DOM4-122-59 (SEQ ID NO:151), DOM4-122-60 (SEQ ID NO:152), DOM4-122-61 (SEQ ID NO:153), DOM4-122-62 (SEQ ID NO:154), DOM4-122-63 (SEQ ID NO:155), DOM4-122-64 (SEQ ID NO:156), DOM4-122-65 (SEQ ID NO:157), DOM4-122-66 (SEQ ID NO:158), DOM4-122-67 (SEQ ID NO:159), DOM4-122-68 (SEQ ID NO:160), DOM4-122-69 (SEQ ID NO:161), DOM4-122-70 (SEQ ID NO:162), DOM4-122-71 (SEQ ID NO:163), DOM4-122-72 (SEQ ID NO:164), DOM4-122-73 (SEQ ID NO:165), DOM4-123 (SEQ ID NO:166), DOM4-124 (SEQ ID NO:167) DOM4-125 (SEQ ID NO:168), DOM4-126 (SEQ ID NO:169), DOM4-127 (SEQ ID NO:170), DOM4-128 (SEQ ID NO:171), DOM4-129 (SEQ ID NO:172), DOM4-129-1 (SEQ ID NO:173), DOM4-129-2 (SEQ ID NO:174), DOM4-129-3 (SEQ ID NO:175), DOM4-129-4 (SEQ ID NO:176), DOM4-129-5 (SEQ ID NO:177), DOM4-129-6 (SEQ ID NO:178), DOM4-129-7 (SEQ ID NO:179), DOM4-129-8 (SEQ ID NO:180), DOM4-129-9 (SEQ ID NO:181), DOM4-129-10 (SEQ ID NO:182), DOM4-129-11 (SEQ ID NO:183), DOM4-129-12 (SEQ ID NO:184), DOM4-129-13 (SEQ ID NO:185), DOM4-129-14 (SEQ ID NO:186), DOM4-129-15 (SEQ ID NO:187), DOM4-129-16 (SEQ ID NO:188), DOM4-129-17 (SEQ ID NO:189), DOM4-129-18 (SEQ ID NO:190), DOM4-129-19 (SEQ ID NO:191), DOM4-129-20 (SEQ ID NO:192), DOM4-129-21 (SEQ ID NO:193), DOM4-129-22 (SEQ ID NO:194), DOM4-129-23 (SEQ ID NO:195), DOM4-129-24 (SEQ ID NO:196), DOM4-129-25 (SEQ ID NO:197), DOM4-129-26 (SEQ ID NO:198), DOM4-129-27 (SEQ ID NO:199), DOM4-129-28 (SEQ ID NO:200), DOM4-129-29 (SEQ ID NO:201), DOM4-129-31 (SEQ ID NO:202), DOM4-129-32 (SEQ ID NO:203), DOM4-129-33 (SEQ ID NO:204), DOM4-129-34 (SEQ ID NO:205), DOM4-129-35 (SEQ ID NO:206), DOM4-129-37 (SEQ ID NO:207), DOM4-129-38 (SEQ ID NO:208), DOM4-129-39 (SEQ ID NO:209), DOM4-129-40 (SEQ ID NO:210), DOM4-129-41 (SEQ ID NO:211), DOM4-129-42 (SEQ ID NO:212), DOM4-129-43 (SEQ ID NO:213), DOM4-129-44 (SEQ ID NO:214), DOM4-130 (SEQ ID NO:215), DOM4-130-1 (SEQ ID NO:216), DOM4-130-2 (SEQ ID NO:217), DOM4-130-3 (SEQ ID NO:218), DOM4-130-4 (SEQ ID NO:219), DOM4-130-5 (SEQ ID NO:220), DOM4-130-6 (SEQ ID NO:221), DOM4-130-7 (SEQ ID NO:222), DOM4-130-8 (SEQ ID NO:223), DOM4-130-9 (SEQ ID NO:224), DOM4-130-10 (SEQ ID NO:225), DOM4-130-11 (SEQ ID NO:226), DOM4-130-12 (SEQ ID NO:227), DOM4-130-13 (SEQ ID NO:228), DOM4-130-14 (SEQ ID NO:229), DOM4-130-15 (SEQ ID NO:230), DOM4-130-16 (SEQ ID NO:231), DOM4-130-17 (SEQ ID NO:232), DOM4-130-18 (SEQ ID NO:233), DOM4-130-19 (SEQ ID NO:234), DOM4-130-20 (SEQ ID NO:235), DOM4-130-21 (SEQ ID NO:236), DOM4-130-22 (SEQ ID NO:237), DOM4-130-23 (SEQ ID NO:238), DOM4-130-24 (SEQ ID NO:239), DOM4-130-25 (SEQ ID NO:240), DOM4-130-26 (SEQ ID NO:241), DOM4-130-27 (SEQ ID NO:242), DOM4-130-28 (SEQ ID NO:243), DOM4-130-31 (SEQ ID NO:244), DOM4-130-32 (SEQ ID NO:245), DOM4-130-33 (SEQ ID NO:246), DOM4-130-34 (SEQ ID NO:247), DOM4-130-35 (SEQ ID NO:248), DOM4-130-36 (SEQ ID NO:249), DOM4-130-37 (SEQ ID NO:250), DOM4-130-38 (SEQ ID NO:251), DOM4-130-39 (SEQ ID NO:252), DOM4-130-40 (SEQ ID NO:253), DOM4-130-41 (SEQ ID NO:254), DOM4-130-42 (SEQ ID NO:255), DOM4-130-43 (SEQ ID NO:256), DOM4-130-44 (SEQ ID NO:257), DOM4-130-45 (SEQ ID NO:258), DOM4-130-46 (SEQ ID NO:259), DOM4-130-47 (SEQ ID NO:260), DOM4-130-48 (SEQ ID NO:261), DOM4-130-49 (SEQ ID NO:262), DOM4-130-50 (SEQ ID NO:263), DOM4-130-51 (SEQ ID NO:264), DOM4-130-52 (SEQ ID NO:265), DOM4-130-53 (SEQ ID NO:266), DOM4-130-54 (SEQ ID NO:267), DOM4-130-55 (SEQ ID NO:268), DOM4-130-56 (SEQ ID NO:269), DOM4-130-57 (SEQ ID NO:270), DOM4-130-58 (SEQ ID NO:271), DOM4-130-59 (SEQ ID NO:272), DOM4-130-60 (SEQ ID NO:273), DOM4-130-61 (SEQ ID NO:274), DOM4-130-62 (SEQ ID NO:275), DOM4-130-63 (SEQ ID NO:276), DOM4-130-64 (SEQ ID NO:277), DOM4-130-65 (SEQ ID NO:278), DOM4-130-66 (SEQ ID NO:279), DOM4-130-67 (SEQ ID NO:280), DOM4-130-68 (SEQ ID NO:281), DOM4-130-69 (SEQ ID NO:282), DOM4-130-70 (SEQ ID NO:283), DOM4-130-71 (SEQ ID NO:284), DOM4-130-72 (SEQ ID NO:285), DOM4-130-73 (SEQ ID NO:286), DOM4-130-74 (SEQ ID NO:287), DOM4-130-75 (SEQ ID NO:288), DOM4-130-76 (SEQ ID NO:289), DOM4-130-77 (SEQ ID NO:290), DOM4-130-78 (SEQ ID NO:291), DOM4-130-79 (SEQ ID NO:292), DOM4-130-80 (SEQ ID NO:293), DOM4-130-81 (SEQ ID NO:294), DOM4-130-82 (SEQ ID NO:295), DOM4-130-83 (SEQ ID NO:296), DOM4-130-84 (SEQ ID NO:297), DOM4-130-85 (SEQ ID NO:298), DOM4-130-86 (SEQ ID NO:299), DOM4-130-87 (SEQ ID NO:300), DOM4-130-88 (SEQ ID NO:301), DOM4-130-89 (SEQ ID NO:302), DOM4-130-90 (SEQ ID NO:303), DOM4-130-91 (SEQ ID NO:304), DOM4-130-92 (SEQ ID NO:305), DOM4-130-93 (SEQ ID NO:306), DOM4-130-94 (SEQ ID NO:307), DOM4-130-95 (SEQ ID NO:308), DOM4-130-96 (SEQ ID NO:309), DOM4-130-97 (SEQ ID NO:310), DOM4-130-98 (SEQ ID NO:311), DOM4-130-99 (SEQ ID NO:312), DOM4-130-100 (SEQ ID NO:313), DOM4-130-101 (SEQ ID NO:314), DOM4-130-102 (SEQ ID NO:315), DOM4-130-103 (SEQ ID NO:316), DOM4-130-104 (SEQ ID NO:317), DOM4-130-105 (SEQ ID NO:318), DOM4-130-106 (SEQ ID NO:319), DOM4-130-107 (SEQ ID NO:320), DOM4-130-108 (SEQ ID NO:321), DOM4-130-109 (SEQ ID NO:322), DOM4-130-110 (SEQ ID NO:323), DOM4-130-111 (SEQ ID NO:324), DOM4-130-112 (SEQ ID NO:325), DOM4-130-113 (SEQ ID NO:326), DOM4-130-114 (SEQ ID NO:327), DOM4-130-115 (SEQ ID NO:328), DOM4-130-116 (SEQ ID NO:329), DOM4-130-117 (SEQ ID NO:330), DOM4-130-118 (SEQ ID NO:331), DOM4-130-119 (SEQ ID NO:332), DOM4-130-120 (SEQ ID NO:333), DOM4-130-121 (SEQ ID NO:334), DOM4-130-122 (SEQ ID NO:335), DOM4-130-123 (SEQ ID NO:336), DOM4-130-124 (SEQ ID NO:337), DOM4-130-125 (SEQ ID NO:338), DOM4-130-126 (SEQ ID NO:339), DOM4-130-127 (SEQ ID NO:340), DOM4-130-128 (SEQ ID NO:341), DOM4-130-129 (SEQ ID NO:342), DOM4-130-130 (SEQ ID NO:343), DOM4-130-131 (SEQ ID NO:344), DOM4-130-132 (SEQ ID NO:345), DOM4-130-133 (SEQ ID NO:346), DOM4-131 (SEQ ID NO:347), DOM4-132 (SEQ ID NO:348), and DOM4-133 (SEQ ID NO:349).

[0206] The antagonist of IL-1R1 fusions of the invention can be produced using any suitable method. For example, some embodiments can be produced by the insertion of a nucleic acid encoding the antagonist of IL-1R1 fusion into a suitable expression vector. The resulting construct can be introduced into a suitable host cell for expression. Upon expression, fusion protein can be isolated or purified from a cell lysate or preferably from the culture media or periplasm using any suitable method. (See e.g., Current Protocols in Molecular Biology (Ausubel, F. M. et al., eds., Vol. 2, Suppl. 26, pp. 16.4.1-16.7.8 (1991)).

[0207] Suitable expression vectors can contain a number of components, for example, an origin of replication, a selectable marker gene, one or more expression control elements, such as a transcription control element (e.g., promoter, enhancer, terminator) and/or one or more translation signals, a signal sequence or leader sequence, and the like. Expression control elements and a signal sequence, if present, can be provided by the vector or other source. For example, the transcriptional and/or translational control sequences of a cloned nucleic acid encoding an antibody chain can be used to direct expression.

[0208] A promoter can be provided for expression in a desired host cell. Promoters can be constitutive or inducible. For example, a promoter can be operably linked to a nucleic acid encoding an antibody, antibody chain or portion thereof, such that it directs transcription of the nucleic acid. A variety of suitable promoters for procaryotic (e.g., lac, tac, T3, T7 promoters for E. coli) and eucaryotic (e.g., simian virus 40 early or late promoter, Rous sarcoma virus long terminal repeat promoter, cytomegalovirus promoter, adenovirus late promoter) hosts are available.

[0209] In addition, expression vectors typically comprise a selectable marker for selection of host cells carrying the vector, and, in the case of a replicable expression vector, an origin or replication. Genes encoding products which confer antibiotic or drug resistance are common selectable markers and may be used in procaryotic (e.g., lactamase gene (ampicillin resistance), Tet gene for tetracycline resistance) and eucaryotic cells (e.g., neomycin (G418 or geneticin), gpt (mycophenolic acid), ampicillin, or hygromycin resistance genes). Dihydrofolate reductase marker genes permit selection with methotrexate in a variety of hosts. Genes encoding the gene product of auxotrophic markers of the host (e.g., LEU2, URA3, HIS3) are often used as selectable markers in yeast. Use of viral (e.g., baculovirus) or phage vectors, and vectors which are capable of integrating into the genome of the host cell, such as retroviral vectors, are also contemplated. Suitable expression vectors for expression in mammalian cells and prokaryotic cells (E. coli), insect cells (Drosophila Schnieder S2 cells, Sf9) and yeast (P. methanolica, P. pastoris, S. cerevisiae) are well-known in the art.

[0210] Antagonist of IL-1R1 fusions can be produced by the expression of a recombinant nucleic acid encoding the protein (e.g., an expression vector) in a suitable host cell, or using other suitable methods. For example, the expression constructs described herein can be introduced into a suitable host cell, and the resulting cell can be maintained (e.g., in culture, in an animal) under conditions suitable for expression of the constructs. The antagonist of IL-1R1 fusion can be isolated (e.g., from the culture media) if desired. Suitable host cells can be prokaryotic, including bacterial cells such as E. coli, B. subtilis and or other suitable bacteria, eucaryotic, such as fungal or yeast cells (e.g., Pichia pastoris, Aspergillus species, Saccharomyces cerevisiae, Schizosaccharomyces pombe, Neurospora crassa), or other lower eucaryotic cells, and cells of higher eucaryotes such as those from insects (e.g., Sf9 insect cells (WO 94/26087 (O'Connor)) or mammals (e.g., COS cells, such as COS-1 (ATCC Accession No. CRL-1650) and COS-7 (ATCC Accession No. CRL-1651), CHO (e.g., ATCC Accession No. CRL-9096), 293 (ATCC Accession No. CRL-1573), HeLa (ATCC Accession No. CCL-2), CV1 (ATCC Accession No. CCL-70), WOP (Dailey et al., J. Virol. 54:739-749 (1985)), 3T3, 293T (Pear et al., Proc. Natl. Acad. Sci. U.S.A., 90:8392-8396 (1993)), NSO cells, SP2/0, HuT 78 cells, and the like (see, e.g., Ausubel, F. M. et al., eds. Current Protocols in Molecular Biology, Greene Publishing Associates and John Wiley & Sons Inc., (1993)).

### Antagonist of IL-1R1 Conjugates

[0211] In another aspect, the invention provides conjugates comprising an antigen-binding fragment of an antibody that binds serum albumin that is bonded to an antagonist of IL-1R1. Such conjugates include “antagonist of IL-1R1 conjugates,” which comprise an antigen-binding fragment of an antibody that binds serum albumin to which an antagonist of IL-1R1 is covalently bonded, and “noncovalent antagonist of IL-1R1 conjugates,” which comprise an antigen-binding fragment of an antibody that binds serum albumin to which an antagonist of IL-1R1 is noncovalently bonded. Preferably, the conjugates are sufficiently stable so that the antigen-binding fragment of an antibody that binds serum albumin and antagonist of IL-1R1 remain substantially bonded (either covalently or noncovalently) to each other under in vivo conditions (e.g., when administered to a human). Preferably, no more than about 20%, no more than about 15%, no more than about 10%, no more than about 9%, no more than about 8%, no more than about 7%, no more than about 6%, no more than about 5%, no more than about 4%, no more than about 3%, no more than about 2%, no more than about 1% or substantially none of the conjugates dissociate or break down to release drug and antigen-binding fragment under in vivo conditions. For example, stability under “in vivo” conditions can be conveniently assessed by incubating drug conjugate or noncovalent drug conjugate for 24 hours in serum (e.g., human serum) at 37° C. In one example of such a method, equal amounts of a drug conjugate and the unconjugated drug are diluted into two different vials of serum. Half of the contents of each vial is immediately frozen at −20° C., and the other half incubated for 24 hours at 37° C. All four samples can then be analyzed using any suitable method, such as SDS-PAGE and/or Western blotting. Western blots can be probed using an antibody that binds the drug. All drug in the drug conjugate lanes will run at the size of the drug conjugate if there was no dissociation. Many other suitable methods can be used to assess stability under “in vivo” conditions, for example, by analyzing samples prepared as described above using suitable analytic methods, such as chromatography (e.g., gel filtration, ion exchange, reversed phase), ELISA, mass spectroscopy and the like.

### Covalent Antagonist of IL-1R1 Conjugates

[0212] In another aspect, the invention provides an antagonist of IL-1R1 conjugate comprising an antigen-binding fragment of an antibody that has binding specificity for serum albumin, and an antagonist of IL-1R1 that is covalently bonded to said antigen-binding fragment, with the proviso that the antagonist of IL-1R1 conjugate is not a single continuous polypeptide chain.

[0213] In some embodiments, the antagonist of IL-1R1 conjugate comprises an immunoglobulin heavy chain variable domain (V_{H}, V_{HH}) that has binding specificity for serum albumin, or an immunoglobulin light chain variable domain (V_{L}) that has binding specificity for serum albumin, and an antagonist of IL-1R1 moiety that is covalently bonded to said V_{H} or V_{L}, with the proviso that the antagonist of IL-1R1 conjugate is not a single continuous polypeptide chain. Preferably the antagonist of IL-1R1 conjugate comprises a single V_{H} that binds serum albumin or a single V_{L} that binds serum albumin. In certain embodiments, the antagonist of IL-1R1 conjugate comprises a Vₖ dAb that binds human serum albumin and comprises an amino acid sequence selected from the group consisting of DOM7h-2 (SEQ ID NO:732), DOM7h-3 (SEQ ID NO:733), DOM7h-4 (SEQ ID NO:734), DOM7h-6 (SEQ ID NO:735), DOM7h-1 (SEQ ID NO:736), DOM7h-7 (SEQ ID NO:737), DOM7h-8 (SEQ ID NO:746), DOM7r-13 (SEQ ID NO:747), and DOM7r-14 (SEQ ID NO:748). In other embodiments, the antagonist of IL-1R1 conjugate comprises a V_{H} dAb that binds human serum albumin and comprises an amino acid sequence selected from the group consisting of DOM7h-22 (SEQ ID NO:739), DOM7h-23 (SEQ ID NO:740), DOM7h-24 (SEQ ID NO:741), DOM7h-25 (SEQ ID NO:742), DOM7h-26 (SEQ ID NO:743), DOM7h-21 (SEQ ID NO:744), and DOM7h-27 (SEQ ID NO:745).

[0214] The antagonist of IL-1R1 conjugates can comprise any desired antagonist if IL-1R1 moiety (e.g., IL-1ra, functional variant of IL-1ra, dAb) and can be prepared using any suitable methods. For example, the antagonist of IL-1R1 moiety can be bonded to the antigen-binding fragment of an antibody that binds serum albumin directly or indirectly through a suitable linker moiety at one or more positions, such as the amino-terminus, the carboxyl-terminus or through amino acid side chains. In one embodiment, the antagonist of IL-1R1 conjugate comprises a dAb that binds human serum albumin and a polypeptide antagonists of TL-IR1 (e.g., human IL-1ra or a functional variant of human IL-1ra), and the amino-terminus of the polypeptide antagonists of IL-1R1 (e.g., human IL-1ra or a functional variant of human IL-1ra) is bonded to the carboxyl-terminus of the dAb directly or through a suitable linker moiety. In other embodiments, the conjugate comprises a dAb that binds human serum albumin and two or more different antagonists of IL-1R1 moieties are covalently bonded to the dAb. For example, a first antagonist of IL-1R1 moiety can be covalently bonded (directly or indirectly) to the carboxyl terminus of the dAb and a second antagonist of IL-1R1 moiety can be covalently bonded (directly or indirectly) to the amino-terminus or through a side chain amino group (e.g., E amino group of lysine). Such conjugates can be prepared using well-known methods of selective coupling. (See, e.g., Hermanson, G. T., Bioconjugate Techniques, Academic Press: San Diego, Calif. (1996).)

[0215] A variety of methods for conjugating antagonists of IL-1R1 to an antigen-binding fragment of an antibody that has binding specificity for serum albumin can be used. The particular method selected will depend on the antagonist of IL-1R1 to be conjugated. If desired, linkers that contain terminal functional groups can be used to link the antigen-binding fragment and the antagonist of IL-1R1. Generally, conjugation is accomplished by reacting an antagonist of IL-1R1 that contains a reactive functional group (or is modified to contain a reactive functional group) with a linker or directly with an antigen-binding fragment of an antibody that binds serum albumin. Covalent bonds form by reacting an antagonist of IL-1R1 that contains (or is modified to contain) a chemical moiety or functional group that can, under appropriate conditions, react with a second chemical group thereby forming a covalent bond. If desired, a suitable reactive chemical group can be added to the antigen-binding fragment or to a linker using any suitable method. (See, e.g., Hermanson, G. T., Bioconjugate Techniques, Academic Press: San Diego, Calif. (1996).) Many suitable reactive chemical group combinations are known in the art, for example an amine group can react with an electrophilic group such as tosylate, mesylate, halo (chloro, bromo, fluoro, iodo), N-hydroxysuccinimidyl ester (NHS), and the like. Thiols can react with maleimide, iodoacetyl, acrylolyl, pyridyl disulfides, 5-thiol-2-nitrobenzoic acid thiol (TNB-thiol), and the like. An aldehyde functional group can be coupled to amine- or hydrazide-containing molecules, and an azide group can react with a trivalent phosphorous group to form phosphoramidate or phosphorimide linkages. Suitable methods to introduce activating groups into molecules are known in the art (see for example, Hermanson, G. T., Bioconjugate Techniques, Academic Press: San Diego, Calif. (1996)).

[0216] In some embodiments, the antigen-binding fragment of an antibody that has binding specificity for serum albumin is bonded to an antagonist of IL-1R1 moiety by reaction of two thiols to form a disulfide bond. In other embodiments, the antigen-binding fragment of an antibody that has binding specificity for serum albumin is bonded to an antagonist of IL-1R1 moiety by reaction of an isothiocyanate group and a primary amine to produce an isothiourea bond.

[0217] Suitable linker moieties can be linear or branched and include, for example, tetraethylene glycol, C₂-C₁₂ alkylene, —NH—(CH₂)ₚ—NH— or —(CH₂)ₚ—NH— (wherein p is one to twelve), —CH₂—O—CH₂—CH₂—O—CH₂—CH₂—O—CH—NH—, a polypeptide chain comprising one to about 100 (preferably one to about 12) amino acids and the like.

### Noncovalent Antagonist of IL-1R1 Conjugates

[0218] Some noncovalent bonds (e.g., hydrogen bonds, van der Waals interactions) can produce stable, highly specific intermolecular connections. For example, molecular recognition interactions achieved through multiple noncovalent bonds between complementary binding partners underlie many important biological interactions, such as the binding of enzymes to their substrates, the recognition of antigens by antibodies, the binding of ligands to their receptors, and stabilization of the three dimensional structure of proteins and peptide. Accordingly, such weak noncovalent interactions (e.g., hydrogen bonding, van Der Waals interactions, electrostatic interactions, hydrophobic interactions and the like) can be utilized to bind an antagonist of IL-1R1 to the antigen-binding fragment of an antibody that has binding specificity for serum albumin.

[0219] Preferably, the noncovalent bond linking the antigen-binding fragment and antagonist of IL-1R1 be of sufficient strength that the antigen-binding fragment and antagonist of IL-1R1 remain substantially bonded to each under in vivo conditions (e.g., when administered to a human). Generally, the noncovalent bond linking the antigen-binding fragment and antagonist of IL-1R1 has a strength of at least about 10¹⁰ M⁻¹. In preferred embodiments, the strength of the noncovalent bond is at least about 10¹¹ M⁻¹, at least about 10¹² M⁻¹, at least about 10¹³ M⁻¹, at least about 10¹⁴ M⁻¹ or at least about 10¹⁵ M⁻¹. The interactions between biotin and avidin and between biotin and streptavidin are known to be very efficient and stable under many conditions, and as described herein noncovalent bonds between biotin and avidin or between biotin and streptavidin can be used to prepare a noncovalent antagonist of IL-1R1 conjugate.

[0220] The noncovalent bond can be formed directly between the antigen-binding fragment of an antibody that has a specificity for serum albumin and antagonist of IL-1R1, or can be formed between suitable complementary binding partners (e.g., biotin and avidin or streptavidin) wherein one partner is covalently bonded to antagonist of IL-1R1 and the complementary binding partner is covalently bonded to the antigen-binding fragment. When complementary binding partners are employed, one of the binding partners can be covalently bonded to the antagonist of IL-1R1 directly or through a suitable linker moiety, and the complementary binding partner can be covalently bonded to the antigen-binding fragment of an antibody that binds serum albumin directly or through a suitable linker moiety.

[0221] Complementary binding partners are pairs of molecules that selectively bind to each other. Many complementary binding partners are known in the art, for example, antibody (or an antigen-binding fragment thereof) and its cognate antigen or epitope, enzymes and their substrates, and receptors and their ligands. Preferred complementary binding partners are biotin and avidin, and biotin and streptavidin.

[0222] Direct or indirect covalent bonding of a member of a complementary binding pair to an antigen-binding fragment that has binding specificity for serum albumin or an antagonist of IL-1R1 can be accomplished as described above, for example, by reacting a complementary binding partner that contains a reactive functional group (or is modified to contain a reactive functional group) with an antigen-binding fragment of an antibody that binds serum albumin, with or without the use of a linker. The particular method selected will depend on the compounds (e.g., antagonist of IL-1R1, complementary binding partner, antigen-binding fragment of an antibody that binds serum albumin) to be conjugated. If desired, linkers (e.g., homobifunctional linkers, heterobifunctional linkers) that contain terminal reactive functional groups can be used to link the antigen-binding fragment and/or the antagonist of IL-1R1 to a complementary binding partner. In one embodiment, a heterobifunctional linker that contains two distinct reactive moieties can be used. The heterobifunctional linker can be selected so that one of the reactive moieties will react with the antigen-binding fragment of an antibody that has binding specificity for serum albumin or the antagonist of IL-1R1, and the other reactive moiety will react with the complementary binding partner. Any suitable linker (e.g., heterobifunctional linker) can be used and many such linkers are known in the art and available for commercial sources (e.g., Pierce Biotechnology, Inc., IL).

### EXAMPLES

### Example 1

### Immunoglobulin Variable Domain Antagonists of IL-1R1

### Methods

### Selections and Screening

[0223] For primary selections, 4G-K2 library of V_{κ} dAbs was panned against IL-1R1-Fc fusion protein (Axxora, Nottingham, UK). Domain antibodies from the primary selection were subjected to three further rounds of selection. Round 1 was performed using protein G coated magnetic beads (Dynal, Norway) and 100 nM IL-1R1-Fc; round 2 was performed using anti-human IgG beads (Novagen, Merck Biosciences, Nottingham, UK) and 10 nM IL-1R1-Fc; and round 3 was performed using protein G beads and 1 nM IL-1R1-Fc. (Henderikx et al., Selection of antibodies against biotinylated antigens. Antibody Phage Display: Methods and protocols, Ed. O'Brien and Atkin, Humana Press (2002).) Elution at each stage was with 1 mg/ml trypsin-PBS. For affinity maturation selections, the above method was used, but with the following modifications: two rounds of selection were performed using protein G beads, round 1 using 1 nM IL-1R1-Fc, and round 2 using 100 pM IL-1R1-Fc. Phage vectors from selection outputs (rounds 2 and 3) were isolated by plasmid preps (Qiagen) and dAb inserts were released by restriction digest with Sal I and Not I. This inserts were ligated into a phage expression vector (Sal I/Not I cut pDOM5) and used to transform E. coli strain HB2151 for soluble expression and screening of dAbs.

### Supernatant Receptor Binding Assay (RBA)

[0224] Single transformed E. coli colonies were picked into 96-well plates containing 2×TY supplemented with 100 μg/ml carbenicillin and 0.1% (w/v) glucose, grown at 37° C. to ˜OD₆₀₀=0.9 and induced with 1 mM IPTG. Supernatants from overnight inductions at 30° C. were screened in a receptor binding assay for the ability to inhibit binding of IL-1β to IL-1RI captured on an ELISA plate. Briefly, MaxiSorp™ immunoassay plates (Nunc, Denmark) were incubated overnight with anti-IL-1RI mouse monoclonal antibody (R&D Systems, Minneapolis, USA). The wells were washed with phosphate buffered saline (PBS) containing 0.1% (v/v) Tween-20 and then blocked with 1% (w/v) BSA in PBS before being incubated with recombinant IL-1RI (500 ng/ml, R&D Systems). The E. coli culture supernatants containing dAbs to be screened were placed in the washed wells of the assay plate, the plate was incubated for 30 min, then IL-1β (4 ng/ml, R&D Systems) was added to each well and mixed. IL-1β binding was detected using biotinylated anti-IL-1β antibody (R&D Systems), followed by peroxidase labelled anti-biotin antibody (Stratech, Soham, UK) and then, incubation with 3,3′,5,5′-tetramethylbenzidine (TMB) substrate (KPL, Gaithersburg, USA). The reaction was stopped by the addition of HCl and the absorbance was read at 450 nm. Anti-IL-1RI dAb activity caused a decrease in IL-1β binding and therefore a decrease in absorbance compared with the IL-1β only control.

### Cell Assay

[0225] Isolated dAbs were tested for their ability to inhibit IL-1-induced IL-8 release from cultured MRC-5 cells (ATCC catalogue no. CCL-171). Briefly, 5000 trypsinised MRC-5 cells in RPMI media were placed in the well of a tissue-culture microtitre plate and mixed with IL-1α or β (R&D Systems, 200 pg/ml final concentration) and a dilution of the dAb to be tested. The mixture was incubated overnight at 37° C. and IL-8 released by the cells into to culture media was quantified in an ELISA (DuoSet®, R&D Systems). Anti-IL-1RI dAb activity caused a decrease in IL-1 binding and a corresponding reduction in IL-8 release.

### Human Whole Blood Assay

[0226] Whole human blood was incubated with a dilution series of the dAb to be tested, and the mixture was incubated for 30 min at 37° C./5% CO₂. Next, 270 or 900 pM (final concentration) IL-1α or IL-1β was added and the mixture, and then the mixtures was incubated at 37° C./5% CO₂ for an additional 20 hours. The blood was then centrifuged (500×g, 5 min) and the IL-6 released into the supernatant was quantified in an ELISA (DuoSet®, R&D Systems). Anti-IL-1RI dAb activity caused a decrease in IL-1 binding and a corresponding reduction in IL-6 release.

### Off-Rate Screening

[0227] These experiments were performed on a BIACORE 3000 surface plasmon resonance instrument, using a CM5 chip (Biacore) coupled with ˜600 RU of IL-1RI (R&D Systems). Analytes were passed over the IL-1RI-coated flow-cell, with in-line referencing against a blank flow-cell, at a flow rate of 30 μl/min in HBS-EP running buffer (Biacore). Ten microlitres of supernatant containing soluble dAb was diluted 1:1 in running buffer, injected (Kinject) at 101/min flow rate and allowed to dissociate in buffer. Clones with improved off-rates compared to parental clones were identified by eye, or by measurement using BIAevaluation software v4.1.

### Affinity Maturation Phage Library Construction

[0228] Two types of libraries were constructed: CDR-re-diversified libraries and error-prone libraries. For the former type of library, PCR reactions were performed, using degenerate oligonucleotides containing NNK or NNS codons, to diversify the required positions in the dAb to be affinity matured. Assembly PCR was then used to generate a full length diversified insert. For the error-prone library, plasmid DNA encoding the dAb to be affinity matured was amplified by PCR, using the GeneMorph® II Random Mutagenesis kit (Stratagene). Inserts produced by either method were digested with Sal I and Not I and used in a ligation reaction with cut phage vector. This ligation was then used to transform E. coli strain TB1 by electroporation and the transformed cells were plated on 2×TY agar containing 15 μg/ml tetracycline, yielding library sizes of >1×10⁸ clones.

### Results

### Primary Selection and Screening

[0229] Primary phage selections were performed using the 4G-K2 library and outputs sub-cloned into a soluble expression vector. dAb clones that inhibit binding of IL-1 to IL-1RI were identified by supernatant RBA (results not shown), then expressed, purified by protein L and tested for their ability to inhibit IL-1-induced IL-8 release in an MRC-5 cell assay. FIG. 1A shows a typical dose-response curve for anti-IL-1RI dAb referred to as DOM4-130 in such a cell assay. The ND₅₀ of DOM4-130 in this assay was approximately 500-1000 nM. FIG. 1B shows a dose-response curve for anti-IL-1RI dAbs referred to as DOM4-122 and DOM4-129 in such a cell assay. The ND₅₀ values of both dAbs was about 1 μM. DOM4-122 and DOM4-129 have the same amino acid sequence in CDRs 1 and 2, and have two out of five amino acid residues identical in CDR3, and therefore were predicted to bind to the same epitope (have the same epitopic specificity) on IL-1R1.

### Affinity Maturation

### DOM4-130

### Stage I Maturation

[0230] Using DOM4-130 as a template, a maturation library was constructed with diversity encoding all 20 amino acids at positions 30, 34, 93 and 94. The resulting phage library was used in soluble selections for binding to IL-1R1 using IL-1RI-Fc. Round 2 selection output was cloned into phage expression vector (pDOM5), dAbs were expressed in E. coli, and the expression supernatants were screened for improved off-rates compared to parental dAb. Clones with improved off-rates were expressed, purified and tested in the MRC-5/IL-8 assay. FIG. 2A depicts a dose-response curve for improved variant DOM4-130-3, which had an ND₅₀ of about 30 nM.

### Stage II Maturation

[0231] Using DOM4-130-3 as template, a maturation library was constructed as described above, except this time diversity was introduced at amino acid residues 49, 50, 51 and 53 in CDR2. The resulting library was again screened for variants with improved off-rates, which were tested in the MRC-5/IL-8 cell assay. FIG. 2B depicts a dose-response curve for improved clone DOM4-130-46 (ND₅₀ about 1 nM), together with an additional variant, DOM4-130-51. DOM4-130-51 was derived from DOM4-130-46, with the mutation S67Y added to improve potency further (ND₅₀ about 300 pM). Further variants of both of these dAbs were produced by introducing the amino acid replacement R107K, to revert the amino acid sequence to the germline sequence at this position, generating DOM4-130-53 and DOM4-130-54, respectively.

### DOM4-122 and DOM4-129

### Stage I Maturation

[0232] Using DOM4-122 as a template, a maturation library was constructed with diversity encoding all 20 amino acids at positions 28, 30, 31, 92 and 93. In parallel, DOM4-129 was affinity matured by error-prone PCR mutagenesis. The resulting phage libraries were used in soluble selections for binding to IL-1R1 using IL-1RI-Fc. Round 2 and 3 selection outputs were cloned into phage expression vector (pDOM5), dAbs were expressed in E. coli, and expression supernatants screened for improved off-rates compared to parent. Clones with improved off-rates were expressed, purified and tested in the MRC-5/IL-8 assay. FIG. 3 depicts a dose-response curve for improved variant DOM4-122-6 and DOM4-129-1, which both had an ND₅₀ value of about 10 nM.

### Stage II Maturation

[0233] DOM4-129-1 and DOM4-122-6 gained an amino acid replacement, L46F, in common during maturation. DOM4-129-1 has an additional amino acid replacement, S56R. Both changes were frequently found in clones isolated from maturation selections, therefore the S56R replacement was introduced into DOM4-122-6, yielding DOM4-122-23. DOM4-122-23 had an ND₅₀ of approximately 1 nM. An additional amino acid replacement, K45M, gained in both DOM4-122 and DOM4-129 was shown to be non-essential when reverted to the germline amino acid in DOM4-122-23, yielding DOM4-122-24.

### Example 2

### Antagonists of IL-1R1 are Efficacious in a Subchronic Model of COPD in C57BL/6 Mice

[0234] In this study, an antagonist of IL-1R1 (and extended half-life fusion protein comprising IL-1ra and a dAb that binds mouse serum albumin), was administered alone or in combination with an antagonists of TNFR1 by the intra-peritoneal injection every 48 hours beginning 24 hours prior to the initial tobacco smoke (TS) exposure. The effects on TS-induced changes in pulmonary inflammatory indices induced by 11 consecutive daily TS exposures were examined 24 hours following the final exposure. The results demonstrate that the antagonist of IL-1R1 was efficacious in the mouse model. ENBREL® (etanercept; Immunex Corporation), which binds TNF and thereby antagonizes TNFR1, was included as a comparator.

Test Compound 1: ENBREL® (etanercept; Immunex Corporation)
Test Compound 2: IL-1 ra/anti-SA dAb (IL-1ra fused to DOM7 m16)
Test Compound 3: 1:1 mixture of PEG DOM1m (anti-TNFR1 dAb comprise an 40 kDa branched polyethylene glycol moiety, TAR2m-21-23) and IL-1ra/anti-SA dAb. For all test substances, the vehicle was sterile saline. Dose volume was 10 ml/kg for test substances 1-3 and 20 ml/kg for test substance 4

[0235] The amino acid sequence of IL-1ra/anti-SA dAb is

(SEQ ID NO:787)

RPSGRKSSKMQAFRIWDVNQKTFYLRNNQLVAGYLQGPNVNLEEKIDVVP
IEPHALFLGIHGGKMCLSCVKSGDETRLQLEAVNITDLSENRKQDKRFAF
IRSDSGPTTSFESAACPGWFLCTAMEADQPVSLTNMPDEGVMVTKFYFQE
DESSGGGGSGGGGSGGGGSGGGGSGGGGSTDIQMTQSPSSLSASVGDRVT
ITCRASQSIIKHLKWYQQKPGKAPKLLIYGASRLQSGVPSRFSGSGSGTD
FTLTISSLQPEDFATYYCQQGARWPQTFGQGTKVEIKR

### Methods

[0236] Female mice (C57BL/6) full barrier bred and certified free of specific micro organisms on receipt (16-20 g) (Charles River) were housed in groups of up to 5 in individually ventilated, solid bottomed cages (IVC) with aspen chip bedding. Environments (airflow, temperature and humidity) within the cages were controlled by the IVC system (Techniplast).

[0237] There were 5 treatment groups, groups 1-4 contained 10 animals and group 5 contained 5 animals. The treatment groups are summarized in Table 1. All treatments were administered intraperatoneally, and the dose volume for groups 1-4 was 10 ml/kg and was 20 ml/kg for group 5. Treatments were administered every 48 hours, and the initial dose was administered 24 hours prior to the initial TS or air exposure. Subsequent treatment doses were administered 1 hour prior to each TS or air exposure.

TABLE 1

| Group | TS/Air | Compound | Dose |
|---|---|---|---|
| No. | Exposure | No. | mg/kg |
| 1 | Sham | Vehicle | 0 |
| 2 | TS | Vehicle | 0 |
| 3 | TS | 1 | 10 |
| 4 | TS | 2 | 10 |
| 5 | TS | 3 | 20 |

### TS Exposure

[0238] Mice (maximum 5 per exposure chamber) were exposed to TS generated from cigarettes (Type 1R1, supplied by University of Kentucky). Initial exposure was to 4 cigarettes on day 1, increasing to a maximum of 6 cigarettes per day by day 6/7. Exposure thereafter to day 11 was 6 cigarettes/day. The rate of increase was regulated with regard to the daily observed tolerance of the mice. The control group of mice was exposed to air for an equivalent length of time on each exposure day (air exposure controls).

### Health Monitoring:

[0239] Animals were weighed prior to the start of the study, on day 6 of the exposure protocol, and at the time of termination. All animals were monitored during and after each test substance administration and TS exposure.

### Terminal Procedures:

[0240] Animals were sacrificed by anaesthetic overdose (pentobarbitone Na, 100 mg/kg i.p.) as follows: All groups were sacrificed 24 hours after the 11^{th} and final TS exposure. Mice from all treatment groups were treated as follows: Blood samples were taken from the sub-clavian artery, placed in a microcentrifuge tube and allowed to clot overnight at 4° C. The clot was removed and the remaining fluid was centrifuged at 2900 rpm in a microcentrifuge for 6 minutes. The resulting supernatant serum was decanted and stored at −40° C. for possible PK analysis. A bronchoalveolar lavage (BAL) was performed using 0.4 ml of phosphate buffered saline (PBS). Cells recovered from the BAL were quantified by total and differential cell counts. Lungs were removed, snap frozen in liquid nitrogen and stored at −80° C. for possible PK analysis

### Data Analysis

[0241] A test for normality was carried out on the data. If the test was positive, then a preliminary analysis was carried out using a one way analysis of variance test (one way ANOVA) followed by a Bonferroni's multiple comparison post test to compare control and treatment groups. If the data was not normally distributed, then a Kruskal-Wallis test followed by Dunn's multiple comparisons test was employed. Data were considered significant when p<0.05.

### Results

[0242] The IL-1ra/SA dAb treatment groups, show significantly reduced cell infiltrates in the lung compared to the TS exposed and vehicle treated control group (FIG. 5). The level of cells in the lung was reduced by 58% for total cells (p<0.01), 56% for macrophages (p<0.001), 59% for polymorphic nuclear cells (p<0.01), 70% for eosinophils p<0.01), and 65% for lymphocytes (p<0.01). A 29% reduction in epithelial cells was observed but this change was not significant.

[0243] The combination treatment group with IL1ra/SA dAb and PEGylated anti-TNFR1 dAb, show significantly reduced cell infiltrates in the lung. 88% inhibition for total cells (p<0.001), 82% for macrophages, 94% for epithelial cells, 93% for polymorphic nuclear cells, 93% for cosinophils and 86% for lymphocytes.

No significant reductions in any of the cell populations were observed in the ENBREL® (etanercept; Immunex Corporation) treated group. ENBREL® (etanercept; Immunex Corporation) even led to an increased number of total cells, although the increase was not statistically significant (FIG. 5).

### Example 3

### Local Administration of an Immunoglobulin Variable Domain to Pulmonary Tissue

[0244] In this study, an domain antibody (V_{H}) that binds hen egg lysozyme was administered locally to pulmonary tissue by intranasal administration, and pharmacokinetics were determined. The results demonstrate that domain antibodies can be delivered locally to pulmonary tissue model.

### Methods

[0245] Female mice (C57BL/6) full barrier bred and certified free of specific micro organisms on receipt (16-20 g) (Charles River) were housed in groups of up to 5 in individually ventilated, solid bottomed cages (IVC) with aspen chip bedding. Environments (airflow, temperature and humidity) within the cages were controlled by the IVC system (Techniplast).

[0246] The domain antibody HEL4 is a V_{H} that binds Hen egg lysozyme. (See, Jespers et al. J. Mol. Biol., 337:893-903 (2004). HEL-4 monomer (12 mg/ml) which contained an HA tag for detection was diluted in 20 mM sodium citrate pH 6.0, 100 mM NaCl. Mice were lightly anaesthetised (Isofluorane/O₂) and 50 microliters of dAb solution or vehicle control was dropped gently onto the nares. The animals were held in an upright position for a few seconds while spontaneously breathing in the solution before being allowed to recover and returned to their cages.

### Treatment Groups

[0247] There were 17 groups, the groups administered HEL-4 each contained 3 mice, while the vehicle control groups each contained two mice. The dose volume was 50 μl (25 μl/nare), and all mice were treated on the same day. Mice were sacrificed 1, 2, 5, 8 or 24 hours after treatment was administered (8 hours and 24 hours after treatment for vehicle groups). The study protocol is summarized in Table 2.

TABLE 2

| | | | | Concentra- | | Sacrifice time |
|---|---|---|---|---|---|---|
| Group | | | | tion | | after |
| No. | Treatment | Dose | | mg/ml | | administration |
| 1 | HEL-4 | 30 | mg/kg | 12 | mg/ml | 1 |
| 2 | HEL-4 | 30 | mg/kg | 12 | mg/ml | 2 |
| 3 | HEL-4 | 30 | mg/kg | 12 | mg/ml | 5 |
| 4 | HEL-4 | 30 | mg/kg | 12 | mg/ml | 8 |
| 5 | HEL-4 | 30 | mg/kg | 12 | mg/ml | 24 |
| 6 | HEL-4 | 3 | mg/kg | 1.2 | mg/ml | 1 |
| 7 | HEL-4 | 3 | mg/kg | 1.2 | mg/ml | 2 |
| 8 | HEL-4 | 3 | mg/kg | 1.2 | mg/ml | 5 |
| 9 | HEL-4 | 3 | mg/kg | 1.2 | mg/ml | 8 |
| 10 | HEL-4 | 3 | mg/kg | 1.2 | mg/ml | 24 |
| 11 | HEL-4 | 1 | mg/kg | 0.4 | mg/ml | 1 |
| 12 | HEL-4 | 1 | mg/kg | 0.4 | mg/ml | 2 |
| 13 | HEL-4 | 1 | mg/kg | 0.4 | mg/ml | 5 |
| 14 | HEL-4 | 1 | mg/kg | 0.4 | mg/ml | 8 |
| 15 | HEL-4 | 1 | mg/kg | 0.4 | mg/ml | 24 |
| 16 | Vehicle | 50 | μl/mouse | 0 | | 8 |
| 17 | Vehicle | 50 | μl/mouse | 0 | | 24 |

### Health Monitoring

[0248] Animals were weighed prior to the start of the study. All animals were monitored during and after each administration. Animals in the 24 hour groups were monitored at regular intervals overnight.

### Terminal Procedures

[0249] Animals were sacrificed by anaesthetic overdose (pentobarbitone Na, 100 mg/kg i.p.). Blood was taken from the subclavian artery, placed in a microcentrifuge tube and allowed to clot overnight at 4° C. The clot was gently removed and the remaining fluid was centrifuged at 2900 rpm in a microcentrifuge for 6 minutes. The resulting supernatant was decanted, placed in a fresh tube, frozen and stored at −40° C. prior to analysis. Bronchoalveolar lavage (BAL) was conducted using 0.4 ml of phosphate buffered saline (PBS) which was instilled and withdrawn 3 times. The BAL was centrifuged at 2700 rpm in a microcentrifuge for 6 minutes and the supernatant removed and stored at −40° C. prior to analysis. The cell pellet was re-suspended in a suitable volume of PBS and total cell count determined using a haemocytometer. Cytospin slides were prepared for differential cell determinations. The lungs were excised, snap frozen and stored at −80° C. prior to analysis. Using a mortar and pestle lungs were pulverized under liquid nitrogen and dissolved in T-PER® Tissue Protein Extraction Reagent (Pierce) and homogenized using 40 strokes with a dounce homogenizer.

### ELISA to Detect HA Tagged HEL-4

[0250] A 96 well Maxisorp (Nunc) assay plate was coated overnight at 4° C. with 100 μl per well of goat polyclonal anti HA tag antibody (Abcam) at 2 μg/ml in carbonate buffer. Wells were washed 3 times with 0.05% tween/PBS and 3 times with PBS. 200 μl per well of 2% BSA in PBS was added to block the plate. After blocking, wells are washed and then 100 μl of HA tagged dAb standard or sample was added. Wells were washed and then 100 μl Protein A—HRP (1:5000 dilution; Amersham) was added to each well. Plates were developed by adding 100 μl of SureBlue 1-Component TMB MicroWell Peroxidase (KPL, Gaithersburg, USA) solution to each well, and the plate was left at room temperature until a suitable signal has developed. The reaction was stopped by the addition of HCl and absorbance was read at 450 nm.

### Results

[0251] The total BAL cell counts showed that administering HEL-4 domain antibody at doses of 1, 3 or 30 mg/kg did not cause significant inflammation in the lungs. Some of the animals had increased cellular infiltrates but these were not significantly different from animals treated with vehicle alone. The HEL-4 levels in the BAL show that the dAbs are delivered efficiently into the deep lung (FIG. 6). A dose related effect was observed. At 2 hours after administration, a maximum level of 700 ug/ml was detected in the lung with the 30 mg/kg dosing. Thus, about 48% (280 μg of 600 μg total delivered) of the administered material was recovered from the lung, which means that more than 48% material that was administered was delivered to the lung but not all dAb delivered to the lung can be recovered, or is present in the surrounding tissues. The levels in the BAL are high for a prolonged period of time and there appears to be a slow release into the surrounding tissues.

[0252] HEL-4 serum levels were detected in the 3 mg/kg and the 30 mg/kg dose groups (FIG. 7). The serum levels showed a similar pattern as the BAL levels. There appears to be a maximum level 2 hours after administration, followed by a slow decline. At 2 hours after administration, maximum levels of 3.5 μg/ml were detected in the serum with the 30 mg/kg dosing. This means that about 1% (5 μg of 600 μg administered) of the administered material was detected in the serum.

### Example 4

### Local Administration of an Antagonist of IL-1R1 to Pulmonary Tissue

[0253] In this study the antagonist of IL-1R1, KINARET® (anakinra; Amgen) a recombinant, nonglycosylated form of the human interleukin-1 receptor antagonist (IL-1Ra) that differs from native human IL-1Ra in that it has the addition of a single methionine residue at its amino terminus, was administered by intra-nasal administration, and pharmacokinetics were evaluated.

### Methods

[0254] KINARET® (anakinra; Amgen) was diluted in 20 mM sodium citrate pH6.0, 100 mM NaCl. All animals were treated on the same day within 1 to 2 hours of warming the solution.

[0255] Female mice (C57BL/6) full barrier bred and certified free of specific micro organisms on receipt (16-20 g) (Charles River) were housed in groups of up to 5 in individually ventilated, solid bottomed cages (IVC) with aspen chip bedding. Environments (airflow, temperature and humidity) within the cages were controlled by the IVC system (Techniplast).

[0256] There were 5 treatment groups, and each group contained 3 animals. The treatment groups are summarized in Table 3. All treatments were administered intranasally, and the dose volume was 50 microliters (25 microliteres per nare). Mice were sacrificed 1, 2, 5, 8, or 24 hours after administration.

TABLE 3

| Group | | Concentration | Sacrifice time after |
|---|---|---|---|
| No. | Dose | mg/ml | administration |
| 1 | 1 mg/kg | 0.4 mg/ml | 1 |
| 2 | 1 mg/kg | 0.4 mg/ml | 2 |
| 3 | 1 mg/kg | 0.4 mg/ml | 5 |
| 4 | 1 mg/kg | 0.4 mg/ml | 8 |
| 5 | 1 mg/kg | 0.4 mg/ml | 24 |

### ELISA to Detect IL1ra.

[0257] A 96 well Maxisorp (Nunc) assay plate was coated overnight at 4° C. with 50 μl per well with mouse anti-human IL1R1 antibody (R&D systems) at 4 μg/ml in carbonate coating buffer pH 9.4. Wells were washed 3 times with 0.05% tween/PBS and 3 times with PBS. 200 μl per well of 1% BSA in PBS was added to block the plate for 1 hour. Wells were washed and then 100 μl of IL1R1 at 500 ng/ml (R&D systems) was added in 0.1% BSA/0.05% tween/PBS for 1 hour. Wells were washed and then 100 μl of IL1ra standard or sample was added in 0.1% BSA/0.05% tween/PBS. IL1ra standard and samples were incubated with the receptor for 30 minutes. IL-11 was then added (R&D Systems) at a final concentration of 4 ng/mL and plates were incubated for another hour. Wells were washed and bound IL-1 was detected with biotinylated anti IL-1β antibody (R&D systems) at 0.5 μg/ml in 0.1% BSA/0.05% tween/PBS for 1 hour. Wells were washed and then 100 μl of anti-biotin-HRP antibody was added (Stratech)(1/5000 in 0.1% BSA/0.05% tween/PBS) for 1 hour. Plates were developed with 100 μl of SureBlue 1-Component TMB MicroWell Peroxidase (KPL, Gaithersburg, USA) solution was added to each well, and the plate was left at room temperature until a suitable signal has developed (˜15 minutes). The reaction was stopped by the addition of HCl and the absorbance was read at 450 nm.

### Results

[0258] The level in the BAL (FIG. 8) was maximum at 1 hour after administration and was ˜11 μg/ml (˜2.75 μg in 0.25 ml of BAL fluid). This means that at least 14% (2.75 μg of 20 μg total administered) of the adminstered material is delivered in the lung. More material will be present in the surrounding tissues but this cannot be recovered. The levels in the BAL are high for a prolonged period of time and show a gradual decline over 24 hrs. (>10-fold decline after 24 hrs).

[0259] The levels in the lung (FIG. 8) is maximum at 1 hr and was ˜3.3 μg/ml. This means that at least 16% (3.3 μg of 20 μg total administered) of the administered material is present in the lung. The levels in the lung are high for a prolonged period of time and show a gradual decline over 24 hrs. (>10-fold decline after 24 hrs).

[0260] The level in the serum (FIG. 8) at 1 hr was ˜260 ng/ml. At 5 hrs the levels in the serum was maximum (350 ng/ml). This means that the percentage of the total delivered dose present in the serum at 5 hrs is ˜2.6% (Total dose administered was 20 μg; 1.5 ml of blood volume). The levels in the serum show a slow decline and after 24 hrs there is only a 5-fold decline in the levels.

### Example 5

### Local Administration of Antagonists of IL-1R1 to Pulmonary Tissue in a Subchronic Model of COPD in C57BL/6 Mice

[0261] In view of the demonstrated ability to locally administer an antagonist to the lung by intranasal administration, a pilot study to assess this delivery route in a disease model was conducted. In this study, Il1ra was administered by the intra-nasal route 1 hour prior to each air or TS exposure. The effects on tobacco smoke (TS) induced changes in pulmonary inflammatory indices induced by 11 consecutive daily TS exposures was examined 24 h following the final exposure. The anti-TNF compound ENBREL® (etanercept; Immunex Corporation) was used as a positive control.

Test Substance 1: ENBREL® (etanercept; Immunex Corporation)
Test Substance 2: KINARET® (anakinra; Amgen)
The vehicle was sterile sodium citrate pH6.0, 100 mM NaCl.

### Methods

[0262] Female mice (C57BL/6) full barrier bred and certified free of specific micro organisms on receipt (16-20 g) (Charles River) were housed in groups of up to 5 in individually ventilated, solid bottomed cages (IVC) with aspen chip bedding. Environments (airflow, temperature and humidity) within the cages were controlled by the IVC system (Techniplast).

[0263] There were 4 treatment groups, and each group contained 10 animals. The treatment groups are summarized in Table 4. All treatments were administered intranasally, and the dose volume was 50 microliters (25 microliteres per nare). Mice were sacrificed 1, 2, 5, 8, or 24 hours after administration. Treatments were administered every 1 hour prior to each TS or air exposure.

TABLE 4

| Group | TS/Air | Compound | Dose |
|---|---|---|---|
| No. | Exposure | No. | mg/kg |
| 1 | Air | Vehicle | 0 |
| 2 | TS | Vehicle | 0 |
| 3 | TS | 1 | 1.0 |
| 4 | TS | 2 | 1.0 |

### TS Exposure

[0264] Mice (maximum 5 per exposure chamber) were exposed to TS generated from cigarettes (Type 1R1, supplied by University of Kentucky). Initial exposure was to 4 cigarettes on day 1, increasing to a maximum of 6 cigarettes per day by day 6/7. Exposure thereafter to Day 11 was to 6 cigarettes per day. The rate of increase was regulated with regard to the daily observed tolerance of the mice. The control group of mice was exposed to air for an equivalent length of time on each exposure day (Air exposure).

### Health Monitoring:

[0265] Animals were weighed prior to the start of the study, on day 6 of the exposure protocol, and at the time of termination. All animals were monitored during and after each test substance administration and TS exposure.

### Terminal Procedures:

[0266] Animals were sacrificed by anaesthetic overdose (pentobarbitone Na, 100 mg/kg i.p.) as follows: All groups were sacrificed 24 hours after the 11^{th} and final TS exposure. Mice from all treatment groups were treated as follows: Blood samples were taken from the sub-clavian artery, placed in a microcentrifuge tube and allowed to clot overnight at 4° C. The clot was removed and the remaining fluid was centrifuged at 2900 rpm in a microcentrifuge for 6 minutes. The resulting supernatant serum was decanted and stored at −40° C. for possible PK analysis. A bronchoalveolar lavage (BAL) was performed using 0.4 ml of phosphate buffered saline (PBS). Cells recovered from the BAL were quantified by total and differential cell counts. Lungs were removed, snap frozen in liquid nitrogen and stored at −80° C. for possible PK analysis

### Data Analysis

[0267] A test for normality was carried out on the data. If the test was positive, then a preliminary analysis was carried out using a one way analysis of variance test (one way ANOVA) followed by a Bonferroni's multiple comparison post test to compare control and treatment groups. If the data was not normally distributed, then a Kruskal-Wallis test followed by Dunn's multiple comparisons test was employed. Data were considered significant when p<0.05.

### Results

[0268] This pilot study was conducted to evaluate local delivery of antagonists of IL-1R1 to pulmonary tissue in a model of respiratory disease. The results showed that the level of total cells in group treated with KINARET® (anakinra; Amgen) were 29% lower (and 11% lower in the group treated with ENBREL® (etanercept; Immunex Corporation)) than in the control group that was exposed to TS by administered vehicle. Although the changes observed in this pilot study did not achieve statistical significance, the results indicate that polypeptide antagonists can be locally administered to pulmonary tissue.

[0269] While this invention has been particularly shown and described with references to preferred embodiments thereof, it will be understood by those skilled in the art that various changes in form and details may be made therein without departing from the scope of the invention encompassed by the appended claims.

The application's sequence listing, which the Patent Office published only in electronic form, follows.

SEQUENCE LISTING (787 sequences)

SEQ ID NO: 1 - protein, 108 aa, Homo sapiens
DIQMTQSPSSLSASVGDRVTITCRASQWIGRELRWYQQKPGKAPMFLIYHASRLQRGVPSRFSGSGSGTDFTLTISSLQPEDFATYYCQQYHGWPLTFGQGTKVEIKR

SEQ ID NO: 2 - protein, 108 aa, Homo sapiens
DIQMTQSPSSLSASVGDRVTITCRASQWIGRELRWYQQKPGKAPKFLIYHASRLQRGVPSRFSGSGSGTDFTLTISSLQPEDFATYYCQQYHGWPLTFGQGTKVEIKR

SEQ ID NO: 3 - protein, 108 aa, Homo sapiens
DIQMTQSPSSLSASVGDRVTITCRASQDIYLNLDWYQQKPGKAPKLLIYGTSDLQSGVPSRFSGSGSGTDFTLTISSLQPEDFATYYCQPSFYFPYTFGQGTKVEIRR

SEQ ID NO: 4 - protein, 108 aa, Homo sapiens
DIQMTQSPSSLSASVGDRVTITCRASQDIYLNLDWYQQKPGKAPKLLINFGSELQSGVPSRFSGSGSGTDFTLTISSLQPEDFATYYCQPSFYFPYTFGQGTKVEIRR

SEQ ID NO: 5 - protein, 108 aa, Homo sapiens
DIQMTQSPSSLSASVGDRVTITCRASQDIYLNLDWYQQKPGKAPKLLINFGSELQSGVPSRFSGSGYGTDFTLTISSLQPEDFATYYCQPSFYFPYTFGQGTKVEIRR

SEQ ID NO: 6 - protein, 108 aa, Homo sapiens
DIQMTQSPSSLSASVGDRVTITCRASQDIYLNLDWYQQKPGKAPKLLINFGSELQSGVPSRFSGSGSGTDFTLTISSLQPEDFATYYCQPSFYFPYTFGQGTKVEIKR

SEQ ID NO: 7 - protein, 108 aa, Homo sapiens
DIQMTQSPSSLSASVGDRVTITCRASQDIYLNLDWYQQKPGKAPKLLINFGSELQSGVPSRFSGSGYGTDFTLTISSLQPEDFATYYCQPSFYFPYTFGQGTKVEIKR

SEQ ID NO: 8 - protein, 108 aa, Homo sapiens
DIQMTQSPSSLSASVGDRVTITCRASQSIYYFLHWYQQKPGKAPKLLIYRASSLQSGVPSRFSGSGSGTDFTLTISSLQPEDFATYYCQQVWRPPLTFGQGTKVEIKR

SEQ ID NO: 9 - protein, 108 aa, Homo sapiens
DIQMTQSPSSLSASVGDRVTITCRASQSIYQSLDWYQQKPGKAPKLLIYYASVLQSGVPSRFSGSGSGTDFTLTISSLQPEDFATYYCQQLSRPPFTFGQGTKVEIKR

SEQ ID NO: 10 - protein, 108 aa, Homo sapiens
DIQMTQSPSSLSTSVGDRVTITCRASQSIEEMLYWYQQKPGKAPKLLIYNASRLQSGVPSRFSGSGSGTDFILTISSLQPEDFATYYCRQVVGTPHTFGQGTKVEIKR

SEQ ID NO: 11 - protein, 108 aa, Homo sapiens
DIQMTQSPSSLSASVGDRVTITCRASQSIDDYLNWYQQKPGKAPKLLIYWASRLQSGVPSRFSGSGSGTDFTLTISSLQPEDFATYYCQQRWLTPSTFGQGTKVEIKR

SEQ ID NO: 12 - protein, 108 aa, Homo sapiens
DIQMTQSPSSLSASVGDRVTITCRASQSIEEMLYWYQQKPGKAPKLLIYNASRLQSGVPSRFSGSGSGTDFTLTISSLQPEDFATYYCRQVVGTPHTFGQGTKVEIKR

SEQ ID NO: 13 - protein, 108 aa, Homo sapiens
DIQMTQSPSSLSASVGDRVTITCRASQSIDDYLNWYQQKPGKAPKLLIYWASRLQSGVPSRFSGSGSGTDFTLTISSLQPEDFATYYCQQKWMGPHTFGQGTKVEIKR

SEQ ID NO: 14 - protein, 108 aa, Homo sapiens
DIQMTQSPSSLSASVGDRVTITCRASQNIDWGLDWYQQKPGKAPKLLIYMASRLQSGVPSRFSGSGSGTDFTLTISSLQPEDFATYYCQQLSMWPFTFGQGTKVEIKR

SEQ ID NO: 15 - protein, 108 aa, Homo sapiens
DIQMTQSPSSLSASVGDRVTITCRASQSILDYLSWYQQKPGKAPKLLIYWASKLQSGVPSRFSGSGSGTDFTLTISSLQPEDFATYYCQQKWMGPHTFGQGTKVEIKR

SEQ ID NO: 16 - protein, 108 aa, Homo sapiens
DIQMTQSPSSLSASVGDRVTITCRASQSISEYLYWYQQKPGKAPKLLIYHASTLQSGVPSRFSGSGSGTDFTLTISSLQPEDFATYYCRQYLRPPLTFGQGTKVEIKR

SEQ ID NO: 17 - protein, 108 aa, Homo sapiens
DIQMTQSPSSLSASVGDRVTITCRASQWIGVSLNWYQQKPGKAPKLLIYQSSLLQSGVPSRFSGSGSGTDFTLTISSLQPEDFATYYCQQVYIFPFTFGQGTKVEIKR

SEQ ID NO: 18 - protein, 108 aa, Homo sapiens
DIQMTQSPSSLSASVGDRVTITCRASQPIERWLYWYQQKPGKAPKLLIYGASELQSGVPSRFSGRGSGTDFTLTISSLQPEDFATYYCQQYHAYPFTFGQGTKVEIKR

SEQ ID NO: 19 - protein, 108 aa, Homo sapiens
DIQMTQSPSSLSASVGDRVTITCRASQNIEWYLNWYQQKPGKAPKLLIYGSSLLQSGVPSRFSGSGSGTDFTLTISSLQPEDFATYYCQQDWSSPFTFGQGTKVEIKR

SEQ ID NO: 20 - protein, 108 aa, Homo sapiens
DIQMTQSPSFLSASVGDRVTITCRASQVIGITLNWYQQKPGKAPKLLIYQGSLLQSGVPSRFSGSGSGTDFTLTINSLQPEDFATYYCQQSWQTPFTFGQGTKVEIKR

SEQ ID NO: 21 - protein, 108 aa, Homo sapiens
DIQMTQSPSSLSASVGDRVTITCRASQEIRAALQWYQQKPGKAPKLLIYQVSILQSGVPSRFSGSGSGTDFTLTISSLQPEDFATYYCQQSDRYPFTFGQGTKVEIKR

SEQ ID NO: 22 - protein, 108 aa, Homo sapiens
DIQMTQSPSSLSASVGDRVTITCRASQYIAEFLYWYQQKPGKAPKLLIYKASILQSGVPSRFSGSGSGTDFTLTISSLQPEDFATYYCQQYNAYPFTFGQGTKVEIKR

SEQ ID NO: 23 - protein, 108 aa, Homo sapiens
DIQMTQSPSSLSASVGDRVTITCRASQSINQVLNWYQQKPGKAPKLLIYQASLLQSGVPSRFSGSGSGTDFTLTISSLQPEDFATYYCQQFWGFPFTFGQGTKVEIKR

SEQ ID NO: 24 - protein, 108 aa, Homo sapiens
DIQMTQSPSSLSASVGDRVTITCRASQSIEHWLYWYQQKPGKAPKLLIYHASQLQSGVPSRFSGSGSGTDFTLTISSLQPEDFATYYCQQYHLPPMTFGQGTKVEIKR

SEQ ID NO: 25 - protein, 108 aa, Homo sapiens
DIQMTQSPSSLSASVGDRVTITCRASQSIKVYLRWYQQKPGKAPKLLIYKASLLQSGVPSRFSGSGSGTDFTLTISSLQPEDFATYYCQQDFDHPSTFGQGTKVEIKR

SEQ ID NO: 26 - protein, 108 aa, Homo sapiens
DIQMTQSPSSLSASVGDRVTITCRASQSIEFFLYWYQQKPGKTPKLLIYHASWLQSGVPSRFSGSGSGTDFTLTISSLQPEDFATYYCQQYFSYPLTFGQGTKVEIKR

SEQ ID NO: 27 - protein, 108 aa, Homo sapiens
DIQMTQSPSSLSASVEDRVTITCRASQSIYYFLHWYQQKPGKAPKLLIYRASSLQSGVPSRFSGSGSGTDFTLTISSLQPEDFATYYCQQVWRPPLTFGQGTKVEIKR

SEQ ID NO: 28 - protein, 108 aa, Homo sapiens
DIQMTQSPSSLSASVGDRVTITCRASQSITVELRWYQQKPGKAPKLLIYHASRLQSGVPSRFSGSGSGTDFTLTISSLQPEDFATYYCQQYATWPLTFGQGTKVEIKR

SEQ ID NO: 29 - protein, 108 aa, Homo sapiens
DIQMTQSPSSLSASVGDRVTITCRASQSIYLSLLWYQQKPGKTPKLLIYNASRLQSGVPSRFSGSGSGTDFTLTISSLQPEDFATYYCQQSWEWPFTFGQGTKVEIKR

SEQ ID NO: 30 - protein, 108 aa, Homo sapiens; identical to SEQ ID NO: 24

SEQ ID NO: 31 - protein, 108 aa, Homo sapiens
DIQMTQSPSSLSASVGDRVTITCRASQSISSYLNWYQQKPGKAPKLLIYGASILQSGVPSRFSGSGSGTDFTLTISSLQPEDFATYYCQQWVWLPITFGQGTKVEIKR

SEQ ID NO: 32 - protein, 108 aa, Homo sapiens
DIQMTQSPSSLSASVGDRVTITCRASQSIQQWLYWYQQKPGKAPKLLIYKASILQSGVPSRFSGSGSGTDFTLTISSLQPEDFATYYCQQYERYPFTFGQGTKVEIKR

SEQ ID NO: 33 - protein, 108 aa, Homo sapiens
DIQMTQSPSSLSASVGDRVTITCRASQSITHALKWYQQKPGKAPKLLIYKASFLQSGVPSRFSGSGSGTDFTLTISSLQPEDFATYYCQQSQLLPMTFGQGTKVEIKR

SEQ ID NO: 34 - protein, 108 aa, Homo sapiens
DIQMTQSPSSLSASVGDRVTITCRASQSIYNYLTWYQQKPGKAPKLLIYGASMLQSGVPSRFSGSGSGTDFTLTISSLQPEDFATYYCQQERSGPYTFGQGTKVEIKR

SEQ ID NO: 35 - protein, 108 aa, Homo sapiens
DIQMTQSPSSLSASVGDRVTITCRASQSISSYLNWYQQKPGKAPKLLIYFASRLQSGVPSRFSGSGSGTDFTLTISSLQPEDFATYYCQQNMLLPVTFGQGTKVEIKR

SEQ ID NO: 36 - protein, 108 aa, Homo sapiens
DIQMTQSPSSLSASVGDRVTITCRASQSIRHFLYWYQQKPGKAPKLLIYHASVLQSGVPSRFSGSGSGTDFTLTISSLQPEDFATYYCQQYGDLPFTFGQGTKVEIKR

SEQ ID NO: 37 - protein, 108 aa, Homo sapiens
DIQMTQSPPSLSASVGDRVTITCRASQSIGWWLYWYQQKPGKAPKLLIYHASRLQSGVPSRFSGSGSGTDFTLTISSLQPEDFATYYCQQYNSTPFTFGQGTKVEIKR

SEQ ID NO: 38 - protein, 108 aa, Homo sapiens
DIQMTQSPSSLSASVGDRVTITCRASQSIDRFLAWYQQKPGKAPKLLIYHASDLQSGVPSRFSGSGSGTDFTLTISSLQPEDFATYYCQQFDQWPFTFGQGTKVEIKR

SEQ ID NO: 39 - protein, 108 aa, Homo sapiens
DIQMTQSPSSLSASVGDRVTITCRASQSIKSRLAWYQQKPGKAPKLLIYKASLLQSGVPSRFSGSGSGTDFTLTISSLQPEDFATYYCQQYSRNPITFGQGTKVEIKR

SEQ ID NO: 40 - protein, 108 aa, Homo sapiens
DIQMTQSPSSLSASVGDRVTITCRASQSISRSLHWYQQKPGKAPKLLIYRASRLQSGVPSRFSGSGSGTDFTLTISSLQPEDFATYYCQQNRLRPHTFGQGTKVEIKR

SEQ ID NO: 41 - protein, 108 aa, Homo sapiens
DIQMTQSPSSLSASVGDRVTITCRASQSIKQFLYWYQQKPGKAPKLLIYQASYLQSGVPSRFSGSGSGTDFTLTISSLQPEDFATYYCQQYEVYPFTFGQGTKVEIKR

SEQ ID NO: 42 - protein, 108 aa, Homo sapiens
DIQMTQSPSSLSASVGDRVTITCRASQSIYHYLYWYQQKPGKAPKLLIYAASLLQSGVPSRFSGSGSGTDFTLTISSLQPEDFATYYCQQYQLYPFTFGQGTKVEIKR

SEQ ID NO: 43 - protein, 108 aa, Homo sapiens
DIQMTQSPSSLSASVGDRVTITCRASQSISSYLNWYQQKPGKAPKLLIYFASSLQSGVPSRFSGSGSGTDFTLTISSLQPEDFATYYCQQGWDVPYTFGQGTKVEIKR

SEQ ID NO: 44 - protein, 108 aa, Homo sapiens
DIQMTQSPSSLSASVGDRVTITCRASQSIDNWLRWYQQKPGKAPKLLIYSASFLQSGVPSRFSGSGSGTDFTLTISSLQPEDFATYYCQQGRSAPQTFGQGTKVEIKR

SEQ ID NO: 45 - protein, 108 aa, Homo sapiens
DIQMTQSPSSLSASVGDRVTITCRASQSIWYWLSWYQQKPGKAPKLLIYYASSLQSGVPSRFSGSGSGTDFTLTISSLQPEDFATYYCQQMSSTPFTFGQGTKVEIKR

SEQ ID NO: 46 - protein, 108 aa, Homo sapiens
DIQMTQSPSSLSASVGDRVTITCRASQSITMRLGWYQQKPGKAPKLLIYNASHLQSGVPSRFSGSGSGTDFTLTISSLQPEDFATYYCQQYFDYPTTFGQGTKVEIKR

SEQ ID NO: 47 - protein, 108 aa, Homo sapiens
DIQMTQSPSSLSASVGDRVTITCRASQSIHWLLSWYQQKPGKAPKLLIYAASSLQSGVPSRFSGSGSGTDFTLTISSLQPEDFATYYCQQNLARPFTFGQGTKVEIKR

SEQ ID NO: 48 - protein, 108 aa, Homo sapiens
DIQMTQSPSSLSASVGDRVTITCRASQSIGERLWWYQQKPGKAPKLLIYNSSVLQSGVPSRFSGSGSGTDFTLTISSLQPEDFATYYCQQSWRGPATFGQGTKVEIKR

SEQ ID NO: 49 - protein, 108 aa, Homo sapiens
DIQMTQSPSSLSASVGDRVTITCRASQDIDRALQWYQQKPGKAPKLLIYMSSVLQSGVPSRFSGSGSGTDFTLTISSLQPEDFATYYCQQQAGYPFTFGQGTKVEIKR

SEQ ID NO: 50 - protein, 108 aa, Homo sapiens
DIQMTQSPSSLSASVGDRVTITCRASQNIDRELRWYQQKPGKAPMLLIYHASRLQSGVPSRFSGSGSGTDFTLTISSLQPEDFATYYCQQYFTWPLTFGQGTKVEIKR

SEQ ID NO: 51 - protein, 108 aa, Homo sapiens
DIQMTQSPSSLSASVGDRVTITCRASQSISTSLQWYQQKPGKAPKLLIYSSSTLQSGVPSRFSGSGSGTDFTLTISSLQPEDFATYYCQQQWEYPFTFGQGTKVEIKR

SEQ ID NO: 52 - protein, 108 aa, Homo sapiens
DIQMTQSPSSLSASVGDRVTITCRASQNIGTALSWYQQKPGKAPKLLIYWASILQSGVPSRFSGSGSGTDFTLTISSLQPEDFATYYCQQTNSWPFTFGQGTKVEIKR

SEQ ID NO: 53 - protein, 108 aa, Homo sapiens
DIQMTQSPSSLSASVGDRVTITCRASQKIDDALQWYQQKPGKAPKLLIYLASHLQSGVPSRFSGSGSGTDFTLTISSLQPEDFATYYCQQQSNWPFTFGQGTKVEIKR

SEQ ID NO: 54 - protein, 108 aa, Homo sapiens
DIRMTQSPSSLSASVGDRVTITCRASQSIGRALQWYQQKPGKAPKLLIYQRSMLQSGVPSRFSGSGSGTDFTLTISSLQPEDFATYYCQQSYLWPFTFGQGTKVEIKR

SEQ ID NO: 55 - protein, 108 aa, Homo sapiens
DIQMTQSPSSLSASVGDRVTITCRASQEIGKELLWYQQKPGKAPKLLIYDVSVLQSGVPSRFSGSGSGTDFTLTISSLQPEDFATYYCQQYQSYPNTFGQGTKVEIKR

SEQ ID NO: 56 - protein, 108 aa, Homo sapiens
DIQMTQSPSSLSASVGDRVTITCRASQQIMRSLNWYQQKPGKAPKLLIYQSSILQSGVPSRFSGSGSGTDFTLTISSLQPEDFATYYCQQAWQYPFTFGQGTKVEIKR

SEQ ID NO: 57 - protein, 108 aa, Homo sapiens
DIQMTQSPSSLSASVGDRVTITCRASQDIQRRLAWYQQKPGKAPKLLIYNVSYLQSGVPSRFSGSGSGTDFTLTISSLQPEDFATYYCQQYNDYPTTFGQGTKVEIKR

SEQ ID NO: 58 - protein, 116 aa, Homo sapiens
EVQLLESGGGLVQPGGSLRLSCAASGFTFRMYQMYWVRQAPGKGLEWVSSISASGAGTYYADSVKGRFTISRDNSKNTLYLQMNSLRAEDTAVYYCAKAASSFDYWGQGTLVTVSS

SEQ ID NO: 59 - protein, 117 aa, Homo sapiens
EVQLLESGGGLVQPGGSLRLSCAASGFTFASYQMYWVRQAPGKGLEWVSTISPSGGGTYYADSVKGRFTISRDNSKNTLYLQMNSLRAEDTAVYYCAKKDTGTFDYWGQGTLVTVSS

SEQ ID NO: 60 - protein, 116 aa, Homo sapiens
EVQLLESGGGLVQPGGSLRLSCAASGFTFNKYSMGWVRQAPGKGLEWVSRISSSGGGTYYADSVKGRFTISRDNSKNTLYLQMNSLRAEDTAVYYCAKVANPFDYWGQGTLVTVSS

SEQ ID NO: 61 - protein, 124 aa, Homo sapiens
EVQLLESGGGLVQPGGSLRLSCAASGFTFNKYSMGWVRQAPGKGLEWVSRISSSGGGTYYADSVKGRFTISRDNSKNTLYLQMNSLRAEDTAVYYCAKEPDRSGYLTRVAFDYWGQGTLVTVSS

SEQ ID NO: 62 - protein, 123 aa, Homo sapiens
EVQLLESGGGLVQPGGSLRLSCAASGFTFETYQMWWVRQAPGKGLEWVSSISPSGSGTYYADSVKGRFTISRDNSKNTLYLQMNSLRAEDTAVYYCAKMCPRCRDVVSLFDYWGQGTLVTVSS

SEQ ID NO: 63 - protein, 121 aa, Homo sapiens
EVQLLESGGGLVQPGGSLRLSCAASGFTFSEYGMWWVRQAPGKGLEWVSGITATGKMTYYADSVKGRFTISRDNSKNTLYLQMNSLRAEDTAVYYCAKSSLPSGQGHFDYWGQGTLVTVSS

SEQ ID NO: 64 - protein, 122 aa, Homo sapiens
EVQLLESGGGLVQPGGSLRLSCAASGFTFREYQMSWARQAPGKGLEWVSTISASGSGTYYADSVKGRFTISRDNSKNTLYLQMNSLRAEDTAVYYCAKRFKISPVFSSFDYWGQGTLVTVSS

SEQ ID NO: 65 - protein, 122 aa, Homo sapiens
EVQLLESGGGLVQPGGSLRLSCAASGFTFAEYQMYWVRQAPGKGLEWVSSISVSGAGTYYADSVKGRFTISRDNSKNTLYLQMNSLRAEDTAVYYCAKSRNTLTDSHRFDYWGQGTLVTVSS

SEQ ID NO: 66 - protein, 124 aa, Homo sapiens
EVQLLESGGGLVQPGGSLRLSCAASGFTFTRYQMAWVRQAPGKGLEWVSSISSSGAGTYYADSVKGRFTISRDNSKNTLYLQMNSLRAEDTAVYYCAKWAANFSGNYRPKFDYWGQGTLVTVSS

SEQ ID NO: 67 - protein, 122 aa, Homo sapiens
EVQLLESGGGLVQPGGSLRLSCAASGFTFKDYTMTWVRQAPGKGLEWVSRISSSGAGTYYADSVKGRFTISRDNSKNTLYLQMNSLRAEDTAVYYCAKVGNSSRVSHTFDYWGQGTLVTVSS

SEQ ID NO: 68 - protein, 122 aa, Homo sapiens
EVQLLESGGGLVQPGGSLRLSCAASGFTFAQYSMGWVRQAPGKGLEWVSRISSSGSGTYYADSVKGRFTISRDNSKNTLYLQMNSLRAEDTAVYYCAKEGRPLTASLRFDYWGQGTLVTVSS

SEQ ID NO: 69 - protein, 119 aa, Homo sapiens
EVQLLESGGGLVRPGGSLRLSCAASGFTFRMYQMYWVRQAPGKGLEWVSSISASGAGTYYADSVKGRFTISRDNSKNTLYLQMNSLRAEDTAVYYCAKGMMPLSSFDYWGQGTLVTVSS

SEQ ID NO: 70 - protein, 119 aa, Homo sapiens
EVQLLESGGGLVQPGGSLRLSCAASGFTFGKYSMSWVRQAPGKGLEWVSSILDSGVFTYYADSVKGRFTISRDNSKNTLYLQMNSLRAEDTAVYYCAKNVSTPEGFDYWGQGTLVTVSS

SEQ ID NO: 71 - protein, 120 aa, Homo sapiens
EVQLLESGGGLVQPGGSLRLSCAASGFTFETYAMSWVRQAPGKGLEWVSSIGMHGRPTYYADSVKGRFTISRDNSKNTLYLQMNSLRAEDTAVYYCAKQKTSQSGAFDYWGQGTLVTVSS

SEQ ID NO: 72 - protein, 119 aa, Homo sapiens
EVQLLESGGGLVQPGGSLRLSCAASGFTFSSYTMEWVRQAPGKGLEWVSRISSSGAGTYYADSVKGRFTISRDNSRNTLYLQMNSLRAEDTAVYYCAKRTSLADVFDYWGQGTLVTVSS

SEQ ID NO: 73 - protein, 122 aa, Homo sapiens
EVQLLESGGGLVQPGGSLRLSCAASGFTFRAYAMAWVRQAPGKGLEWVSTISGTGDHTYYADSVKGRFTISRDNSKNTLYLQMNSLRAEDTAVYYCAKAHGNPVSDLSFDYWGQGTLVTVSS

SEQ ID NO: 74 - protein, 120 aa, Homo sapiens
EVQLLESGGGLVQPGGSLRLSCAASGFTFRRYDMSWVRQAPGKGLEWVSTISSTGRTTYYADSVKGRFTISRDNSKNTLYLQMNSLRAEDTAVYYCAKALETVSGAFDYWGQGTLVTVSS

SEQ ID NO: 75 - protein, 108 aa, Homo sapiens
DIQMTQSPSSLSASVGDRVTITCRASQNIGYSLDWYQQKPGKAPRLLIYFGSRLQSGVPSRFSGSGSGTDFTLTISSLQPEDFATYYCQQLLKPPFTFGQGTKVEIKR

SEQ ID NO: 76 - protein, 108 aa, Homo sapiens
DIQMTQSPSSLSASVGDRVTITCRASQRIGPSLLWYQQKPGKAPKLLIYNTSVLQSGVPSRFRGSGSGTDFTLTISSLQPEDFATYYCQQTWNYPFTFGQGTKVEIKR

SEQ ID NO: 77 - protein, 108 aa, Homo sapiens
DIQMTQSPSSLSASVGDRVTITCRASQNIESGLWWYQQKPGKAPKLLIYNSSFLQSGVPSRFSGSGSGTDFTLTISSLQPEDFATYYCQQPWQSPTTFGQGTKVEIKR

SEQ ID NO: 78 - protein, 108 aa, Homo sapiens
DIQMTQSPSSLSASVGDRVTITCRASQNIGQNLWWYQQKPGKAPKLLIYGSSKLQSGVPPRFSGSGSGTDFTLTISSLQPEDFATYYCQPAWQGPKTFGQGTKVEIKR

SEQ ID NO: 79 - protein, 108 aa, Homo sapiens
DIQMTQSPSSLSASVGDRVTITCRASQWISHRLMWYQQKPGKAPKLLIYRASELQSGVPSRFSGSGSGTDFTLTISSLQPEDFATYYCQQNARMPHTFGQGTKVEIKR

SEQ ID NO: 80 - protein, 108 aa, Homo sapiens
DIQMTQSPSSLSASVGDRVTITCRASQSIDTGLDWYQQKPGKAPKLLIYRVSTLQSGVPSRFSGSGSGTDFTLTISSLQPEDFATYYCQQLRRPPFTFGQGTKVEIKR

SEQ ID NO: 81 - protein, 108 aa, Homo sapiens
DIQMTQSPSSLSASVGDRVTITCRASQNIGSALQWYQQKPGKAPKLLIYQISKLQSGVPSRFSGSGSGTDFTLTISSLQPEDFATYYCQQNESWPFTFGQGTKVEIKR

SEQ ID NO: 82 - protein, 108 aa, Homo sapiens
DIQMTQSPSSLSASVGDRVTITCRANQRIESSLNWYQQKPGKAPKLLIYLSSILQSGVPSRFSGSGSGTDFTLTISSLQPEDFATYYCQQQWTYPFTFGQGTKVEIKR

SEQ ID NO: 83 - protein, 108 aa, Homo sapiens
DIQMTQSPSSLSASVGDRVTITCRASQNIGKSLDWYQQKPGKAPKLLIYLTSMLQSGVPSRFSGSGSGTDFTLTISSLQPEDFATYYCQQLQRPPFTFGQGTKVEIKR

SEQ ID NO: 84 - protein, 108 aa, Homo sapiens
DIQMTQSPSSLSASVGDRVTITCRASQSIGKWLYWYQQKPGKAPKLLIYESSLLQSGVPSRFSGSGSGTDFTLTISSLQPEDFATYYCQQYDIYPFTFGQGTKVEIKR

SEQ ID NO: 85 - protein, 108 aa, Homo sapiens
DIQMTQSPSSLSASVGDRVTITCQASQHIGEELLWYQQKPGKDPKLLIYSGSTLQSGVPSRFSGSGSGTDFTLTISSLQPEDFATYYCQQYLVWPNTFGQGTKVEIKR

SEQ ID NO: 86 - protein, 108 aa, Homo sapiens
DIQMTQSPSSLSASVGDRVTITCRASQNIKTSLLWYQQKPGKAPKLLIYWASRLQSGVPSRFSGSGSGTDFTLTISSLQPEDFATYYCQQTLDWPFTFGQGTKVEIKR

SEQ ID NO: 87 - protein, 108 aa, Homo sapiens
DIQMTQSPSSLSASVGDRVTITCRASQPIWYKLNWYQQKPGKAPKLLIYAASMLQSGVPSRFSGSGSGTDFTLTISSLQPEDFATYYCQQQLIHPYTFGQGTKVEIKR

SEQ ID NO: 88 - protein, 108 aa, Homo sapiens
DIQMTQSPSSLSASVGDRVTITCRASQDIDNNLWWYQQKPGKAPKLLIYSASLLQSGVPSRFSGSGSGTDFTLTISSLQPEDFATYYCQQAWTSPKTFGQGTKVEIKR

SEQ ID NO: 89 - protein, 108 aa, Homo sapiens
DIQMTQSPSSLSASVGDRVTITCRASQSISEYLYWYQQKPGKAPKLLIYHASVLQRGVPSRFSGSGSGTDFTLTISSLQPEDSATYYCQQYAFSPRTFGQGTKVEIKR

SEQ ID NO: 90 - protein, 108 aa, Homo sapiens
DIQMTQSPSSLSASVGDRVTITCRASQGIHISLQWYQQKPGKAPKLLIYQGSILQSGVPSRFSGSGSGTDFTLTISSLQPEDFATYYCQQQYHFPFTFGQGTKVEIKR

SEQ ID NO: 91 - protein, 108 aa, Homo sapiens
DIQMTQSPSSLSASVGDRVTITCRASQPILRALAWYQQKPGKAPKLLIYLSSHLQSGVPSRFSGSGSGTDFTLTISSLQPEDFATYYCQQRWVQPYTFGQGTTVEIKR

SEQ ID NO: 92 - protein, 108 aa, Homo sapiens
DIQMTQSPSSLSASVGDRVAITCRASQRIMKALNWYQQKPGKAPKLLIYQASLLQSGVPSRFSGGGSGTDFTLTISSLQPEDLATYYCQQTDVWPFTFGQGTKVEIKR

SEQ ID NO: 93 - protein, 108 aa, Homo sapiens
DIQMTQSPSSLSASVGDRVTITCRASQVIDRTLYWYQQKPGKAPKLLIYNVSFLQSGVPSRFSGSGSGTDFTLTISSLQPEDFATYYCQQYESKPYTFGQGTKVEIKR

SEQ ID NO: 94 - protein, 108 aa, Homo sapiens
DIQMTQSPSSLSASVGDRVTITCRASQPINTFLYWYQQKPGKAPRLLIYKSSILQSGVPSRFSGSGSGTDFTLTISSLQPEDFATYYCQQYNLYPFTFGQGTKVEIKR

SEQ ID NO: 95 - protein, 108 aa, Homo sapiens
DIQMTQSPSSLSASVGDRVTITCRASQNIDRELRWYQQKPGKAPMLLIYHASRLQSGVPSRFSGSGSGTDFTLTISSLQPEDFATYYCQQYANWPLTFGQGTKVEIKR

SEQ ID NO: 96 - protein, 108 aa, Homo sapiens
DIQMTQSPSSLSASVGDRVTITCRASQSIGRELRWYQQKPGKAPMFLIYHASRLQSGVPSRFSGSGSGTDFTLTISSLQPEDFATYYCQQYHSWPLTFGQGTKVEIKR

SEQ ID NO: 97 - protein, 108 aa, Homo sapiens
DIQMTQSPSSLSASVGDRVTITCRASQSIGRELRWYQQKPGKAPMFLIYHASRLQSGVPSRFSGSGSGTDFTLTISSLQPEDFATYYCQQYFHWPLTFGQGTKVEIKR

SEQ ID NO: 98 - protein, 108 aa, Homo sapiens
DIQMTQSPSSLSASVGDRVTITCRASQSIGRELRWYQQKPGKAPMFLIYHASRLQRGVPSRFSGSGSGTDFTLTISSLQPEDFATYYCQQYHSWPLTFGQGTKVEIKR

SEQ ID NO: 99 - protein, 108 aa, Homo sapiens
DIQMTQSPSSLSASVGDRVTITCRASQNIGRELRWYQQKPGKAPMFLIYHASRLQSGVPSRFSGSGSGTDFTLTISSLQPEDFATYYCQQYNSWPLTFGQGTKVEIKR

SEQ ID NO: 100 - protein, 108 aa, Homo sapiens
DIQMTQSPSSLSASVGDRVTITCRASQHIGVELRWYQQKPGEAPMFLIYHASRLQSGVPSRFSGSGSGTDFTLTISSLQPEDFATYYCQQYYGWPLTFGQGTKVEIKR

SEQ ID NO: 101 - protein, 108 aa, Homo sapiens
DIQMTQSPSSLSASVGDRVTITCRASQWIGRELRWYQQKPGKAPMFLIYHASRLQSGVPSRFSGSGSGTDFTLTISSLQPEDFATYYCQQYHGWPLTFGQGTKVEIKR

SEQ ID NO: 102 - protein, 108 aa, Homo sapiens
DIQMTQSPSSLSASVGDRVTITCRASQSITKELRWYQQKPGKAPMLLIYHASRLQRGVPSRFSGSGSGTDFTLTISSLQPEDFATYYCQQYHSWPLTFGQGTKVEIKR

SEQ ID NO: 103 - protein, 108 aa, Homo sapiens
DIQMTQSPSSLSASVGDRVAITCRASQGIGRELRWYQQKPGKAPMLLIHHASRLQSGVPSRFSGSGSGTDFTLTISSLQPEDFATYYCQQYNRWPLTFGQGTKVEIKR

SEQ ID NO: 104 - protein, 108 aa, Homo sapiens
DIQMTQSPSSLSASVGDRVTITCRASQNIGRELRWYQQKPGEAPMLLIYHASRLQSGVPSRFSGSGSGTDFTLTISSLQPEDFATYYCQQYFYWPLTFGQGTKVEIKR

SEQ ID NO: 105 - protein, 108 aa, Homo sapiens
DIQMTQSPSSLSASVGDRVTITCRASQNITRELRWYQQKPGKAPMLLIYHASRLQSGVPSRFSGSGSGTDFTLTISSLQPEDFATYYCQQYHGWPLTFGQGTKVEIKR

SEQ ID NO: 106 - protein, 108 aa, Homo sapiens
DIQMTQSPSSLSASVGDRVTITCRASQAIGRELRWYQQKPGKAPMLLIHHASRLQSGVPSRFSGSGSGTDFTLTISSLQPEDFATYYCQQYNGWPLTFGQGTKVEIKR

SEQ ID NO: 107 - protein, 108 aa, Homo sapiens
DIQMTQSPSSLSASVGDRVTITCRASQDIGRELRWYQQKPGKAPMFLIYHASRLQSGVPSRFSGSGSGTDFTLTISSLQPEDFATYYCQQYGFWPLTFGQGTKVEIKR

SEQ ID NO: 108 - protein, 108 aa, Homo sapiens
DIQMTQSPSSLSASVGDRVTITCRASQDITKELRWYQQKPGKAPMLLIHHASRLQSGVPSRFSGSGSGTDFTLTISSLQPEDFATYYCQQYHSWPLTFGQGTKVEIKR

SEQ ID NO: 109 - protein, 108 aa, Homo sapiens
DIQMTQSPSSLSASVGDRVTITCRASQSIGRELRWYQQKPGKAPMFLIYHASRLQSGVPSRFSGSGSGTDFTLTISSLQPEDFATYYCQQYYLWPLTFGQGTKVEIKR

SEQ ID NO: 110 - protein, 108 aa, Homo sapiens
DIQMTQSPSSLSASVGDRVTITCRASQRIGVELRWYQQKPGKAPMPLIYHASRLQSGVPSRFSGSGSGTDFTLTISSLQPEDFATYYCQQYFGWPLTFGQGTKVEIKR

SEQ ID NO: 111 - protein, 108 aa, Homo sapiens
DIQMTQSPSSLSASVGDRVTITCRASQWIDRELRWYQQKPGKAPMLLIYHASRLQSGVPSRFSGSGSGTDFTLTISSLQPEDFATYYCQQYHGWPLTFGQGTKVEIKR

SEQ ID NO: 112 - protein, 108 aa, Homo sapiens
DIQMTQSPSSLSASVGDRVTITCRASQSIFKELRWYQQKPEEAPMLLIHHASRLQSGVPSRFSGSGSGTDFTLTISSLQPEDFATYYCQQYHGWPLTFGQGTKVEIKR

SEQ ID NO: 113 - protein, 108 aa, Homo sapiens
DIQMTQSPSSLSASVGDRVTITCRASQEIGRELRWYQQKPGEAPMPLIYHASRLQSGVPSRFSGSGSGTDFTLTISSLQPEDFATYYCQQYFTWPLTFGQGTKVEIKR

SEQ ID NO: 114 - protein, 108 aa, Homo sapiens
DIQMTQSPSSLSASVGDRVTITCRASQPIGIELRWYQQKPGKAPMPLIYHASRLQSGVPSRFSGSGSGTDFTLTISSLQPEDFATYYCQQYHGWPLTFGQGTKVEIKQ

SEQ ID NO: 115 - protein, 108 aa, Homo sapiens
DIQMTQSPSSLSASVGDRVTITCRASQSIGRELRWYQQKPGKAPMLLIYHASRLRSGVPSRFSGSGSGTDFTLTISSLQPEDFATYYCQQYNGWPLTFGQGTKVEIKR

SEQ ID NO: 116 - protein, 108 aa, Homo sapiens
DIQMTQSPSSLSASVGDRVTITCRASQSIGRELRWYQQKPGKAPMFLIYHASRLQSGVPSRFSGSGSGTDFTLTISSLQPEDFATYYCQQYYDWPLTFGQGTKVEIKR

SEQ ID NO: 117 - protein, 108 aa, Homo sapiens
DIQMTQSPSSLSASVGDRVTITCRASQPIGRELRWYQQKPGKAPMFLIYHASRLQSGVPSRFSGSGSGTDFTLTISSLQPEDFATYYCQQYSGWPLTFGQGTKVEIKR

SEQ ID NO: 118 - protein, 108 aa, Homo sapiens
DIQMTQSPSSLSASVGDRVTITCRASQWIGRELRWYQQKPGKAPMLLIYHASRLQRGVPSRFSGSGSGTDFTLTISSLQPEDFATYYCQQYHGWPLTFGQGTKVEIKR

SEQ ID NO: 119 - protein, 108 aa, Homo sapiens
DIQMTQSPSSLSASVGDRVTITCRASQWIGRELRWYQQKPGKAPKLLIYHASRLQRGVPSRFSGSGSGTDFTLTISSLQPEDFATYYCQQYHGWPLTFGQGTKVEIKR

SEQ ID NO: 120 - protein, 108 aa, Homo sapiens
DIQMTQSPSSLSASVGDRVTITCRASQWIGRELRWYQQKPGEAPMFLIYHASRLQRGVPSRFSGSGSGTDFTLTISSLQPEDFATYYCQQYHGWPLTFGQGTKVEIKR

SEQ ID NO: 121 - protein, 108 aa, Homo sapiens
DIQMTQSPSSLSASVGDRVTITCRASQWIGRELRWYQQKPGKAPMFLIHHASRLQRGVPSRFSGSGSGTDFTLTISSLQPEDFATYYCQQYHGWPLTFGQGTKVEIKR

SEQ ID NO: 122 - protein, 108 aa, Homo sapiens
DIQMTQSPSSLSASVGDRVTITCRASQWIGRELRWYQQKPGEAPMFLIHHASRLQRGVPSRFSGSGSGTDFTLTISSLQPEDFATYYCQQYHGWPLTFGQGTKVEIKR

SEQ ID NO: 123 - protein, 108 aa, Homo sapiens
DIQMTQSPSSLSASVGDRVTITCRASQWIGRELRWYQQKPGKAPKFLIYHASRLIKGVPSRFSGSGSGTDFTLTISSLQPEDFATYYCQQYHGWPLTFGQGTKVEIKR

SEQ ID NO: 124 - protein, 108 aa, Homo sapiens
DIQMTQSPSSLSASVGDRVTITCRASQWIGRELRWYQQKPGKAPKFLIYHASRLQRGVPSRFSGSGSGTDFTLTISSLQPEDFATYYCQQYHGFPLTFGQGTKVEIKR

SEQ ID NO: 125 - protein, 108 aa, Homo sapiens
DIQMTQSPSSLSASVGDRVTITCRASQWIGRELRWYQQKPGKAPKFLIYHASRLYKGVPSRFSGSGSGTDFTLTISSLQPEDFATYYCQQYHGWPLTFGQGTKVEIKR

SEQ ID NO: 126 - protein, 108 aa, Homo sapiens
DIQMTQSPSSLSASVGDRVTITCRASQWIGRELRWYQQKPGKAPKFLIYHASRLQSGVPSRFSGSGSGTDFTLTISSLQPEDFATYYCQQYHGWPLTFGQGTKVEIKR

SEQ ID NO: 127 - protein, 108 aa, Homo sapiens
DIQMTQSPSSLSASVGDRVTITCRASQWIGRELRWYQQKPGKAPKLLIYHASRLQSGVPSRFSGSGSGTDFTLTISSLQPEDFATYYCQQYHGWPLTFGQGTKVEIKR

SEQ ID NO: 128 - protein, 108 aa, Homo sapiens
DIQMTQSPSSLSASVGDRVTITCRASAWIGRELRWYQQKPGKAPKFLIYHASRLIKGVPSRFSGSGSGTDFTLTISSLQPEDFATYYCQQYHGWPLTFGQGTKVEIKR

SEQ ID NO: 129 - protein, 108 aa, Homo sapiens
DIQMTQSPSSLSASVGDRVTITCRASGWIGRELRWYQQKPGKAPKFLIYHASRLYKGVPSRFSGSGSGTDFTLTISSLQPEDFATYYCQQYHGWPLTFGQGTKVEIKR

SEQ ID NO: 130 - protein, 108 aa, Homo sapiens
DIQMIQSPSSLSASVGDRVTITCRASQWIGRELRWYQQKPGKAPKLLIHHASRLQRGVPSRFSGSGSGTDFTLTISSLQPEDFTTYYCQQYHGWPLTFGQGTKVEIKR

SEQ ID NO: 131 - protein, 108 aa, Homo sapiens
DIQMTQSPSSLSASVGDRVTITCRASQWIGRELRWYQQKPGKAPKPLIYHASRLQRGVPSRFSGSGSGTDFTLTISSLQPEDFATYYCQQYHGWPLTFGQGTKVEIER

SEQ ID NO: 132 - protein, 108 aa, Homo sapiens
DIQMTQSPSSLSASVGDRVTITCRASQWIGRELRWYQQKPGKDPKPLIYHASRLQRGVPSRFSGSGSGTGFTLTISSLQPEDFATYYCQQYHGWPLTFGQGTKVEIKR

SEQ ID NO: 133 - protein, 108 aa, Homo sapiens
DIQMTQSPSSLSASVGDRVTITCRASQWIGRELRWYQQKPGKDPKVLIFHASRLQRGVPSRFSGSGSGTDFTLTISSLQPEDFATYYCQQYHGWPLTFGQGTKVEIKR

SEQ ID NO: 134 - protein, 108 aa, Homo sapiens
DIQMTQSPSSLSASVGDRVTITCRASQWIGRELRWYQQKPGKAPKQLIYHASRLQRGVPSRFSGSGSGTDFTLTISSLQPEDFTTYYCQQYHGWPLTFGQGTKVEIKR

SEQ ID NO: 135 - protein, 108 aa, Homo sapiens
GIQMTQSPSSLSASVGDRVTITCRASQWIGRELRWYQQKPGKASKPLIYHASRLQRGVPSRFSGSGSGTDFTLTISSLQPEDFATYYCQQYHGWPLTFGQGTKVEIKR

SEQ ID NO: 136 - protein, 108 aa, Homo sapiens
DIQMTQSPSSLSASVGDRVTITCRASQWIGRELRWYQQKPGKDPKLLIHHASRLQRGVPSRFSGSGSGTDFTLTISSLQPEDFATYYCQQYHGWPLTFGQGTKVEIKR

SEQ ID NO: 137 - protein, 108 aa, Homo sapiens
DIQMTQFPSSLSASVGDRVSITCRASQWIGRELRWYQQKPGKDPKPLIYHASRLQRGVPSRFSGSGSGTDFTLTISSLQPEDLATYYCQQYHGWPLTFGQGTKVEIKR

SEQ ID NO: 138 - protein, 108 aa, Homo sapiens
DIQMTQSPSSLSASVGDRVTITCRASQWIGRELRWYQQKPGKAPKPLIYHASRLQRGVPSRFSGSGSGTDFTLTISSLQPEDFATYYCQQYHGWPLTFGQGTKVEIKR

SEQ ID NO: 139 - protein, 108 aa, Homo sapiens
DIQMTQSPSSLSASVGDRVIITCRASQWIGRELRWYQQKPGKAPKLLIFHASRLQRGVPSRFSGSGSGTDFTLTISSLQPEDFATYYCQQYHGWPLTFGQGTKVEIKR

SEQ ID NO: 140 - protein, 108 aa, Homo sapiens
DIQMTQSPSSLSASVGDRVTITCRASQWIGRELRWYQQKPGKSPKPLIYHASRLQRGVPSRFSGSGSGTDFTLIISSLQPEDFATYYCQQYHGWPLTLGQGTKVEIKR

SEQ ID NO: 141 - protein, 108 aa, Homo sapiens
DIQMTQSPPSLSASVGDRVTITCRASQWIGRELRWCQQKPGKAPKLLIFHASRLQRGVPSRFSGSGSGTDFTLTISSLQPEDFATYYCQQYHGWPLTFGQGTKVEIKR

SEQ ID NO: 142 - protein, 108 aa, Homo sapiens
DIQMTQSPSSLSASVGDRVTITCRASQWIGRELRWYQQKPGKAPKLLIHHASRLQRGVPSRFSGSGSGTDFTLTISSLQPEDFATYYCQQYHGWPLTFGQGTKVEIKR

SEQ ID NO: 143 - protein, 108 aa, Homo sapiens
DIQMTQSPSSLSASVGDRVTITCRASQWIGRELRWYQQKPGKAPKLLIHHASRLQRGVPSRFSGSGSGADFTLTISSLQPEDFATYYCQQYHGWPLTFGQWTKVEIKR

SEQ ID NO: 144 - protein, 108 aa, Homo sapiens
DIQMTQSPSSLSASVGDRVTITCRASQWIGRELRWYQQKPGKAPKLLFHHASRLQRGVPSRFSGSGSGTDFTLTISSLQPEDFATYYCQQYHGWPLTFGQGTKVEIKR

SEQ ID NO: 145 - protein, 108 aa, Homo sapiens
DIQMTQSPSSLSASVGDRVTITCRASQWIGRELRWYQQKPGKAPKLLIFHASRLQRGVPSRFSGSGSGTDFTLTISSLQPEDFATYYCQQYHGWPLTFGQGTKVEIKR

SEQ ID NO: 146 - protein, 108 aa, Homo sapiens
DIQMTQSPSSLSASVGDRVTITCRASQWIGRELRWYQQKPGKAPMPLIYHASRLQRGVPSRFSGSGSGTDFTLTISSLQPEDFATYYCQQYHGWPLTFGQGTKVEIKR

SEQ ID NO: 147 - protein, 108 aa, Homo sapiens
DIQMTQSPSSLSASVGDRVTITCRASQWIGRELRWYQQKPGKAPKLLIFHASRLQRGVPSRFSGSGSGTDFTLTISSLQPEDFAAYYCQQYHGWPLTFGQGTKVEIKR

SEQ ID NO: 148 - protein, 108 aa, Homo sapiens
DIQMTQSPSSLSASVGDRVTITCRTSQWIGRELRWYQQKPGKAPKLLIHHASRLQRGVPSRFSGSGSGTDFTLTISSLQPEDFATYYCQQYHGWPLTFGQGTKVEIKR

SEQ ID NO: 149 - protein, 108 aa, Homo sapiens
DIQMTQSPSSLSASVGDHVTITCRASQWIGRELRWDQQKPGKAPKLLIYHASRLQRGVPSRFSGSGSGTDFTLTISSLQPEDFATYYCQQYHGWPLTFGQGTKVEIKR

SEQ ID NO: 150 - protein, 108 aa, Homo sapiens
DIQMTQSPSSLSASVGDRVTITCRASQWIGRELRWYQQKPGKAPTPLIYHASRLQRGVPSRFSGSGSGTDFTLTISSLQPEDFATYYCQQYHGWPLTFGQGTKVEIKR

SEQ ID NO: 151 - protein, 108 aa, Homo sapiens
DIQMTQSPSSLSASVGDRVTITCRASQWIGRELRWYQQKPGKAPKQLIYHASRLQRGVPSRFSGSGSGSDFTLTISSLQPEDFATYYCQQYHGWPLTFGQGTKAEIKR

SEQ ID NO: 152 - protein, 108 aa, Homo sapiens
DIQMTQSPSSLSASVGDRVAITCRASQWIGRELRWYQQKPGKAPKLLIFHASRLQRGVPSRFSGSGSGTDFTLTISSLQPEDFATYYCQQYHGWPLTFGQGTKVEIKR

SEQ ID NO: 153 - protein, 108 aa, Homo sapiens
GIQMTQSPSSLSASVGDRVTITCRASQWIGRELRWYQQKPGKDPKPLIYHASRLQRGVPSRFSGSGSGTDFTLTISSLQPEDFATYYCQQYHGWPLTFGQGTKVEIKR

SEQ ID NO: 154 - protein, 108 aa, Homo sapiens
DIQMTQSPSSLSASVGDRVTITCRASQWIGRELRWYQQKPGKAPKVLIFHASRLQRGVPSRFSGSGSGTDFTLTISSLQPEDFATYYCQQYHGWPLTFGQGTKVEIKR

SEQ ID NO: 155 - protein, 108 aa, Homo sapiens
DIQMTQSPSSLSASVGDRVTITCRASQWIGRELRWYQQKPGKDPKPLIYHASRLQRGVPSRFSGSGSGTDFTLTISSLQPEDFATYYCQQYHGWPLTSGQGTKVEIKR

SEQ ID NO: 156 - protein, 108 aa, Homo sapiens
DIQMTQSPSSLSASVGDRVTITCRASQWIGRELRWYQQEPGEAPKPLIYHASRLQRGVPSRFSGSGSGTDFTLTISSLQPDDSATYYCQQYHGWPLTFGQGTRVEIKR

SEQ ID NO: 157 - protein, 108 aa, Homo sapiens
DIQMTQSPSSLSASVGDRVTITCRASQWIGRELRWYQQEPGKAPKLLIHHASRLQRGVPSRFSGSGSGTDFTLTISSLQPEDFATYYCQQYHGWPLTFGQGTKVEIKR

SEQ ID NO: 158 - protein, 108 aa, Homo sapiens
DIQMTQSPSSLSASVGDRVTITCRASQWIGRELRWYQQKPGKAPKLLIFHASRLQRGVPSRFSGSGSGTDFTLTISSLQPEDYATYYCQQYHGWPLTFGQGTKVEIKR

SEQ ID NO: 159 - protein, 108 aa, Homo sapiens
DIQMTQSPSSLSASVGDRVTITCRASQWIGRELRWYQQKPGKAPNPLIYHASRLQRGVPSRFSGSGSGTDFTLTISSLQPEDFATYYCQQYHGWPLTFGQGTKVEIKR

SEQ ID NO: 160 - protein, 108 aa, Homo sapiens
DIQMTQSPSSLSASVGDRVTITCRASQWIGRELRWYQQKPGKAPKQLIYHASRLQRGVPSRFSGSGSGTDFTLTISSLQPEDFATYYCQQYHGWPLTSGQGTKVEIKR

SEQ ID NO: 161 - protein, 108 aa, Homo sapiens
DIQMTQSPSSLSASVGDRVTITCRASQWIDRELRWYQQKPGKAPKQLIYHASRLQRGVPSRFSGSGSGTDFTLTISSLQPEDFATYYCQQYHGWPLTFGQGTKVEIKR

SEQ ID NO: 162 - protein, 108 aa, Homo sapiens
DIQMTQSPSSLSASVGDRVTITCRASQWIGRELRWYQQKPGKAPKPLIYHASRLQRGVPSRFSGSRSGTDFTLTISSLQPEDFATYYCQQYHGWPLTFGQGTKVEIKR

SEQ ID NO: 163 - protein, 108 aa, Homo sapiens
DIQMTQSPSSLSASVGDRVTITCRASQWVGRELRWYQQIPGKAPKQLIYHASRLQRGVPSRFSGSGSGTDFTLTIGSLQPEDFATYYCQQYHGWPLTFGQGTKVEIKR

SEQ ID NO: 164 - protein, 108 aa, Homo sapiens
DIQMTQSPSSLSASVGDHVTITCRASQWIGRELRWDQQKPGKAPKFLIYHASRLQRGVPSRFSGSGSGTDFTLTISSLQPEDFATYYCQQYHGWPLTFGQGTKVEIKR

SEQ ID NO: 165 - protein, 108 aa, Homo sapiens
DIQMTQSPSSLSASVGDRVTITCRASQWIGRELRWYQQKPGKAPKGLIYHASRLQRGVPSRFSGSGSGTDFTLTISSLQPEDFATYYCQQYHGWPLTFGQGTKVEIKR

SEQ ID NO: 166 - protein, 108 aa, Homo sapiens
DIHMTQSPSSLSASVGDRVTITCRASQHIGRSLQWYQQKPGKAPKLLIYYTSILQSGVPSRFSGSGSGTDFTLTISSLQPEDFATYYCQQQGEFPFTFGQGTKVEIKR

SEQ ID NO: 167 - protein, 108 aa, Homo sapiens
DIQMTQSPSSLSASVGDRVTITCRASQHIKNFLYWYQQKPGKAPKLLIYHASTLQSGVPSRFSGSGSGTDFTLTISSLQPEDFATYYCQQYMDEPRTFGQGTKVEIKR

SEQ ID NO: 168 - protein, 108 aa, Homo sapiens
DIQMTQSPSSLSASVGDRVTITCRASQVISVALNWYQQKPGKAPKLLIYQGSILQSGVPSRFSGSGSGTDFTLTISSLQPEDFATYYCQQSWQWPFTFGQGTKVEIKR

SEQ ID NO: 169 - protein, 108 aa, Homo sapiens
DIQMTQSPSSLSASVGDRVTITCRASQAIGNMLYWYQQKPGKAPKLLIYNASYLQSGVPSRFSGSGSGTDFTLTISSLQPEDYATYYCQQREMIPHTFGQGTKVGIKR

SEQ ID NO: 170 - protein, 108 aa, Homo sapiens
DIQMTQSPSSLSASVGDRVTITCRASQDIGEELLWYQQKPGKAPKLLIYSASSLRSGVPSRFSGSGSGTDFTLTISSLQPEDFATYYCQQYVTSPNTFGQGTKVEIKR

SEQ ID NO: 171 - protein, 108 aa, Homo sapiens
DIQMTQSPSSLSASVGDRVTITCRASQGIQTFLYWYQQKPGKAPKLLIYSSSILQRGVPSRFSGSGSGTDFTLTISSLQPEDFATYYCQQYGNYPFTFGQGTKVEIKR

SEQ ID NO: 172 - protein, 108 aa, Homo sapiens
DIQMTQSPSSLSASVGDRVTITCRASQNIDRELRWYQQKPGKAPMLLIYHASRLQSGVPSRFSGSGSGTDFTLTISSLQPEDFATYYCQQYHDFPLTFGQGTKVEIKR

SEQ ID NO: 173 - protein, 108 aa, Homo sapiens
DIQMTQSPSSLSASVGDRVTITCRASQNIDRELRWYQQKPGKAPMFLIYHASRLQRGVPSRFSGSGSGTDFTLTISSLQPEDFATYYCQQYHDFPLTFGQGTKVEIKR

SEQ ID NO: 174 - protein, 108 aa, Homo sapiens
DIQMTQSPSSLSASVGDRVTITCRASQNIDRELRWYQQKPGKAPMFLIYHASRLQHGVPSRFSGSGSGTDFTLTISSLQPEDFATYYCQQYHDFPLTFGQGTKVEIKR

SEQ ID NO: 175 - protein, 108 aa, Homo sapiens
DIQMTQSPSSLSASVGDRVTITCRASQNIDRELRWYQQKPGKAPVFLIYHASRLQSGVPSRFSGSGSGTDFTLTISSLQPEDFATYYCQQYHDFPLTFGQGTKVEIKR

SEQ ID NO: 176 - protein, 108 aa, Homo sapiens
DIQLTQSPSSLSASVGDRVTITCRASQNIDRELRWYQQKPGKAPMFLIYHASRLQSGVPSRFSGSGSGTDFTLTIRSLQPEDFATYYCQQYHDFPLTSGQGTKVEIKR

SEQ ID NO: 177 - protein, 108 aa, Homo sapiens
DIQMTQSPSSLSASVGDRVTITCRASQNIDRELRWYQQKPGKAPMFLIYHASRLQSGVPSRFSGSGSGTDFTLTISSLQPEDYATYYCQQYHDFPLTFGQGTKVEIKR

SEQ ID NO: 178 - protein, 108 aa, Homo sapiens
DIQMTQSPSSLSASVGDRVTITCRASQNIDRELRWYQQKPGKAPMFLIYHASRLQSGVPSRFSGSGSGTDFTLTISSLQPEDFATYYCQQYHDFPLTFGQGTKVEIKR

SEQ ID NO: 179 - protein, 108 aa, Homo sapiens
DIQMTQSPSSLSASVGDRVTITCRASQNIDRELRWYQQKPGKAPMPLIYHASRLQRGVPSRFSGRGSGTDFSLTISSLQPEDFATYYCQQYHDFPLTFGQGTKVEIKR

SEQ ID NO: 180 - protein, 108 aa, Homo sapiens
DIQMTQSPSSLSASVGDRVTITCRASQNIGRELRWYQQKPGKAPMFLIYHASRLQRGVPSRFSGSGSGTDFTLTISSLQPEDFATYYCQQYHDFPLTFGQGTKVEIKR

SEQ ID NO: 181 - protein, 108 aa, Homo sapiens
DIQMTQSPSSLSASVGDRVTITCRASQNIDRELRWYQQKPGKAPRFLIYHASRLQSGVPSRFSGSGSGTDFTLTISSLQPEDFATYYCQQYHDFPLTIGQGTKVEIKR

SEQ ID NO: 182 - protein, 108 aa, Homo sapiens
DIQMTQSPSSLSASVGDRVTITCRASQNIGRELRWYQQKPGKAPMFLIYHASRLQSGVPSRFSGSGSGTDFTLTISSLQPEDFATYYCQQYHDFPLTFGQGTKVEIKR

SEQ ID NO: 183 - protein, 108 aa, Homo sapiens
DIQMTQSPSSLSASVGDRVTITCRASQNIDRELRWYQQKPGKDPMFLIYHASRLQRGVPSRFSGSGSGTYFTLTISSLQPEDFATYYCQQYHDFPLTFGQGTKVEIKR

SEQ ID NO: 184 - protein, 108 aa, Homo sapiens
DIQMTQSPSSLSASVGDRVTITCRASQNIDRELRWYQQKPGKAPMFLIYHASRLLSGVPSRFSGSGFGTDFTLTISSLQPEDFATYYCQQYHDFPLTFGQGTKVEIKR

SEQ ID NO: 185 - protein, 108 aa, Homo sapiens
DIQMTQSPSSLSASVGDRVTITCRASQSIGRELRWYQQKPGKAPMFLIYHASRLQRGVPSRFSGSGSGTDFTLTISSLQPEDFATYYCQQYHDFPLTFGQGTKVEIKR

SEQ ID NO: 186 - protein, 108 aa, Homo sapiens
DIQMTQSPSSLSASVGDRVTITCRASQNIDRELRWYQQKPGKAPMPLIYHASRLQSGVPSRFSGSGSGTDFTLTISSLQPEDFATYYCQQYHDFPLTFGQGTKVEIKR

SEQ ID NO: 187 - protein, 108 aa, Homo sapiens
DIQMTQSPSSLSASVGDRVTITCRASQNIDRELRWYQQKPGEAPMFLIYHASRLQSGVPSRFSGSGSGTDFTLTISSLQPEDFATYYCQQYHDFPLTFGQGTKVEIKR

SEQ ID NO: 188 - protein, 108 aa, Homo sapiens
DIQMTQSPSSLSASVGDRVTITCRASQNIDRELRWYQQKPGKAPMFLIYHASRLQRGVPSRFSGSGSGTDFTLTISSLQPEDFATYYCQQYHDFPLTFGQGTKVENKR

SEQ ID NO: 189 - protein, 108 aa, Homo sapiens
EIKMTQSPSSLSASVGDRVTITCRASKNIDRELRWYQQKPGKAPMFLIYHASRLLKGVPSRFSGSGSGTDFTLTISSLQPEDFATYYCQQYHDFPLTFGQGTKVEIKR

SEQ ID NO: 190 - protein, 108 aa, Homo sapiens
PIVMTQSPSSLSASVGDRVTITCRASSSIDRELRWYQQKPGKAPMFLIYHASRLMKGVPSRFSGSGSGTDFTLTISSLQPEDFATYYCQQYHDFPLTFGQGTKVEIKR

SEQ ID NO: 191 - protein, 108 aa, Homo sapiens
DIQMTQSPSSLSASVGDRVTITCRASNNIDRELRWYQQKPGKAPMFLIYHASRLMKGVPSRFSGSGSGTDFTLTISSLQPEDFATYYCQQYHDFPLTFGQGTKVEIKR

SEQ ID NO: 192 - protein, 108 aa, Homo sapiens
DIQMTQSPSSLSASVGDRVTITCRASQNIDRELRWYQQKPGKAPMFLIYHASRLLRGVPSRFSGSGSGTDFTLTISSLQPEDFATYYCQQYHDFPLTFGQGTKVEIKR

SEQ ID NO: 193 - protein, 108 aa, Homo sapiens
DIQMTQSPSSLSASVGDRVTITCRASQNIDRELRWYQQKPGKAPMFLIYHASRLRRGVPSRFSGSGSGTDFTLTISSLQPEDFATYYCQQYHDFPLTFGQGTKVEIKR

SEQ ID NO: 194 - protein, 108 aa, Homo sapiens
DIQMTQSPSSLSASVGDRVTITCRASQNIDRELRWYQQKPGKAPMFLIYHASRLQRGVPSRFSGSGSGTDFTLTISSLQPEDFATYYCQQYHDFPLTIGQGTKVEIKR

SEQ ID NO: 195 - protein, 108 aa, Homo sapiens
DIQMTQSPSSLSASVGDRVTITCRASQNIDRELRWYQQKPGKDPMFLIYHASRLQRGVPSRFSGSGSGTDFTLTISSLQPEDFATYYCQQYHDFPLTFGQGTKVEIKR

SEQ ID NO: 196 - protein, 108 aa, Homo sapiens
NIDMTQSPSSLSASVGDRVTITCRASQNIDRELRWYQQKPGKAPMFLIYHASRLYRGVPSRFSGSGSGTDFTLTISSLQPEDFATYYCQQYHDFPLTFGQGTKVEIKR

SEQ ID NO: 197 - protein, 108 aa, Homo sapiens
HISMTQSPSSLSASVGDRVTITCRASSNIDRELRWYQQKPGKAPMFLIYHASRLIKGVPSRFSGSGSGTDFTLTISSLQPEDFATYYCQQYHDFPLTFGQGTKVEIKR

SEQ ID NO: 198 - protein, 108 aa, Homo sapiens
EIRMTQSPSSLSASVGDRVTITCRASNNIDRELRWYQQKPGKAPMFLIYHASRLYKGVPSRFSGGGSGTDFTLTISSLQPEDFATYYCQQYHDFPLTFGQGTKVEIKR

SEQ ID NO: 199 - protein, 108 aa, Homo sapiens
RIVMTQSPSSLSASVGDRVTITCRASNNIDRELRWYQQKPGKAPMFLIYHASRLIKGVPSRFSGSGSGTDFTLTISSLQPEDFATYYCQQYHDFPLTFGQGTKVEIKR

SEQ ID NO: 200 - protein, 108 aa, Homo sapiens
PIRMTQSPSSLSASVGDRVTITCRASANIDRELRWYQQKPGKAPMFLIYHASRLIKGVPSRFSGSGSGTDFTLTISSLQPEDFATYYCQQYHDFPLTFGQGTKVEIKR

SEQ ID NO: 201 - protein, 108 aa, Homo sapiens
TISMTQSPSSLSASVGDRVTITCRASSNIDRELRWYQQKPGKAPMFLIYHASRLYRGAPSRFSGSGSGTDFTLTISSLQPEDFATYYCQQYHDFPLTFGQGTKVEIKR

SEQ ID NO: 202 - protein, 108 aa, Homo sapiens
RILMTQSPSSLSASVGDRVTITCRASLNIDRELRWFQQKPGKAPMFLIYHASRLHKGVPSRFSGSGSGTDFTLTISSLQPEDFATYYCQQYHDFPLTFGQGTKVEIKR

SEQ ID NO: 203 - protein, 108 aa, Homo sapiens
GIVMTQSPSSLSASVGDRVTITCRASINIDRELRWYQQKPGKAPMFLIYHASRLHKGAPSRFSGSGSGTDFTLTISSLQPEDFATYYCQQYHDFPLTFGQGTKVEIKR

SEQ ID NO: 204 - protein, 108 aa, Homo sapiens
SIVMTQSPSSLSASVGDRVTITCRASQNIDRELRWYQQKPGKAPMFLIYHASRLHKGVPSRFSGSGSGTDFTLTISSLQPEDFATYYCQQYHDFPLTFGQGTKVEIKR

SEQ ID NO: 205 - protein, 108 aa, Homo sapiens
DILMTQSPSSLSASVGDRVTITCRASTNIDRELRWYQQKPGKAPMFLIYHASRLYKGVPSRFSGSGSGTDFTLTISSLQPEDFATYYCQQYHDFPLTLGQGTKVEIKR

SEQ ID NO: 206 - protein, 108 aa, Homo sapiens
QINMTQSPSSLSASVGDRVTITCRASSNIDRELRWYQQKPGKAPMFLIYHASRLIKGVPSRFSGSGSGTDFTLTISSLQPEDFATYYCQQYHDFPLTFGQGTKVEIKR

SEQ ID NO: 207 - protein, 108 aa, Homo sapiens
TIQMTQSPSSLSASVGDRVTITCRASENIDRELRWYQQKPGKAPMFLIYHASRLIKGVPSRFSGSGSGTDFTLTISSLQPEDFATYYCQQYHDFPLTFGQGTKVEIKR

SEQ ID NO: 208 - protein, 108 aa, Homo sapiens
QILMTQSPSSLSASVGDRVTITCRASSNIDRELRWYQQKPGKAPMFLIYHASRLMKGVPSRFSGSGSGTDFTLTISSLQPEDFATYYCQQYHDFPLTFGQGTKVEIKR

SEQ ID NO: 209 - protein, 108 aa, Homo sapiens
QIVMTQSPSSLSASVGDRVTITCRASGNIDRELRWYQQKPGKAPMFLIYHASRLYKGVPSRFSGSGSGTDFTLTISSLQPEDFATYYCQQYHDFPLTFGQGTKVEIKR

SEQ ID NO: 210 - protein, 108 aa, Homo sapiens
DILMTQSPSSLSASVGDRVTITCRASSNIDRELRWYQQKPGKAPMFLIYHASRLMKGVPSRFSGSGSGTDFTLTISSLQPEDFATYYCQQYHDFPLTFGQGTKVEIKR

SEQ ID NO: 211 - protein, 108 aa, Homo sapiens
GIEMTQSPSSLSASVGDRVTITCRASNNIDRELRWYQQKPGKAPMFLIYHASRLHRGVPSRFSGSGSGTDFTLTISSLQPEDFATYYCQQYHDFPLTFGQGTKVEIKR

SEQ ID NO: 212 - protein, 108 aa, Homo sapiens
GIVMTQSPSSLSASVGDRVTITCRASNNIDRELRWYQQKPGKAPMFLIYHASRLYKGVPSRFSGSGSGTDFTLTISSLQPEDFATYYCQQYHDFPLTFGQGTKVEIKR

SEQ ID NO: 213 - protein, 108 aa, Homo sapiens
PIKMTQSPSSLSASVGDRVTITCRASRNIDRELRWYQQKPGKAPMFLIYHASRLMHGVPSRFSGSGSGTDFTLTISSLQPEDFATYYCQQYHDFPLTFGQGTKVEIKR

SEQ ID NO: 214 - protein, 108 aa, Homo sapiens
NIVMTQSPSSLSASVGDRVTITCRASQNIDRELRWYQQKPGKAPMFLIYHASRLYKGVPSRFSGSGSGTDFTLTISSLQPEDFATYYCQQYHDFPLTFGQGTKVEIKR

SEQ ID NO: 215 - protein, 108 aa, Homo sapiens
DIQMTQSPSSLSASVGDRVTITCRASQDIYLNLNWYQQKPGKAPKLLIYGTSNLQSGVPSRFSGSGSGTDFTLTISSLQPEDFATYYCQPSFLYPYTFGQGTKVEIRR

SEQ ID NO: 216 - protein, 108 aa, Homo sapiens
DIQMTQSPSSLSASVGDRVTITCRASQDIYLNLNWYQQKPGKAPKLLIYGTSNLQSGVPSRFSGSGSGTDFTLTISSLQPEDFATYYCQPSFYFPYTFGQGTKVEIRR

SEQ ID NO: 217 - protein, 108 aa, Homo sapiens
DIQMTQSPSSLSASVGDRVTITCRASQDIYLNLDWYQQKPGKAPKLLIYGTSNLQSGVPSRFSGSGSGTDFTLTISSLQPEDFATYYCQPSFFFPYTFGQGTKVEIRR

SEQ ID NO: 218 - protein, 108 aa, Homo sapiens
DIQMTQSPSSLSASVGDRVTITCRASQDIYLNLDWYQQKPGKAPKLLIYGTSNLQSGVPSRFSGSGSGTDFTLTISSLQPEDFATYYCQPSFYFPYTFGQGTKVEIRR

SEQ ID NO: 219 - protein, 108 aa, Homo sapiens
DIQMTQSPSSLSASVGDRVTITCRASQDIYLNLDWYQQKPGKAPKLLIYGTSNLQSGVPSRFSGSGSGTDFTLTISSLQPEDFATYYCQPSFFHPYTFGQGTKVEIRR

SEQ ID NO: 220 - protein, 108 aa, Homo sapiens
DIQMTQSPSSLSASVGDRVTITCRASQDIFLNLEWYQQKPGKAPKLLIYGTSNLQSGVPSRFSGSGSGTDFTLTISSLQPEDFATYYCQPSFYFPYTFGQGTKVEIRR

SEQ ID NO: 221 - protein, 108 aa, Homo sapiens
DIQMTQSPSSLSASVGDRVTITCRASQDIYLNLDWYQQKPGKAPKLLIYGTSNLQSGVPSRFSGSGSGTDFTLTISSLQPEDFATYYCQPSFLFPYTFGQGTKVEIRR

SEQ ID NO: 222 - protein, 108 aa, Homo sapiens
DIQMTQSPSSLSASVGDRVTITCRASQDIYLNLDWYQQKPGEAPKLLIYGTSNLQSGVPSRFSGSGSGTDFTLTISSLQPEDFATYYCQPSFLYPYTFGQGTKVEIRR

SEQ ID NO: 223 - protein, 108 aa, Homo sapiens
DIQMTQSPSSLSASVGDRVTITCRASQDIYLNLDWYQQKPGKAPKLLIYGTSNLQSGVPSRFSGSGSGTDFTLTIGSLQPEDFATYYCQPSFLYPYTFGQGTKVEIRR

SEQ ID NO: 224 - protein, 108 aa, Homo sapiens
DIQMTQSPSSLSASVGDRVTITCRASQDIYLNLDWYQQKPGKAPRLLIYGTSNLQSGVPSRFSGSGSGTDFTLTISSLQPEDFATYYCQPSFLYPYTFGQGTKVEIRR

SEQ ID NO: 225 - protein, 108 aa, Homo sapiens
DIQMTQSPPSLSASVGDRVTITCRASQDIYLNLNWYQQKPGKAPKLLIYGTSNLQSGVPSRFSGSGSGTDFTLTISSLQPEDFATYYCQPSFYLPYTFGQGTKVEIRR

SEQ ID NO: 226 - protein, 108 aa, Homo sapiens
DIQVTQSPSSLSASVGDRVTITCRASQDIYLNLNWYQQKPGKAPKLLIYGTSNLQSGVPSRFSGSGSGTDFTLTISSLQPEDFATYYCQPSFYFPYTFGQGTKVEIRR

SEQ ID NO: 227 - protein, 108 aa, Homo sapiens
DIQMTQSPSSLSASVGDRVTITCRASQDIYLNLNWYQQKPGKAPKLLIYGTSDLQSGVPSRFSGSGSGTDFTLTISSLQPEDFATYYCQPSFWMPYTFGQGTKVEIRR

SEQ ID NO: 228 - protein, 108 aa, Homo sapiens
DIQMTQSPSSLSASVGDRVTITCRASQDIYLNLNWYQQKPGKAPKLLIYGTSNLQSGVPSRFGGSGSGTDFTLTISSLQPEDFATYYCQPSFYHPYTFGQGTKVEIRR

SEQ ID NO: 229 - protein, 108 aa, Homo sapiens
DIQMTQSPSSLSASVGDRVTITCRASQDIYLNLDWYQQKPGKAPKLLIYGTSNLQSGVPSRFSGSGSGTDFTLTISSLQPEDFATYYCQPSFYYPYTFGQGTKVEIRR

SEQ ID NO: 230 - protein, 108 aa, Homo sapiens
DIQMTQSPSSLSASVGDRVTITCRASQDIWLNLDWYQQKPGEAPKLLIYGTSNLQSGVPSRFSGSGSGTDFTLTISSLQPEDFATYYCQPSFYFPYTFGQGTKVEIRR

SEQ ID NO: 231 - protein, 108 aa, Homo sapiens
DIQMTQSPSSLSASVGDRVTITCRASQDIYLNLDWYQQKPGEAPKLLIYGTSNLQSGVPSRFSGSGSGTDFTLTISSLQPEDLATYYCQPSFYFPYTFGQGTKVEIRR

SEQ ID NO: 232 - protein, 108 aa, Homo sapiens
DIQMTQSPSSLSASVGDRVTITCRASQDIYLNLNWYQQKPGKAPKLLIYGTSNLQSGVPSRFSGSGYGTDFTLTISSLQPEDFATYYCQPSFLYPYTFGQGTKVEIRR

SEQ ID NO: 233 - protein, 108 aa, Homo sapiens
DIQMTQSPSSLSASVGDRVTITCLASQDIYLNLNWYQQKPGKAPKLLIYGTSNLQSGVPSRFSGSGYGTDFTLTISSLQPEDFATYYCQPSFLYPYTFGQGTKVEIRR

SEQ ID NO: 234 - protein, 108 aa, Homo sapiens
DIQMTQSPSSLSASVGDRVTITCRASQDIYLNLNWYQQKPGKAPKLLIYGTSDLQSGVPSRFSGSGSGTDFTLTISSLQPEDFATYYCQPSFLYPYTFGQGTKVEIRR

SEQ ID NO: 235 - protein, 108 aa, Homo sapiens
DIQMTQSPSSLSASVGDRVTITCRASQDIWLNLDWYQQKPGKAPKLLIYGTSDLQSGVPSRFSGSGSGTDFTLTISSLQPEDFATYYCQPSFMFPYTFGQGTKVEIRR

SEQ ID NO: 236 - protein, 108 aa, Homo sapiens
DIQMTQSPSSLSASVGDRVTITCRASQDIYLNLNWYQQKPGKAPKLLIYGTSNLQSGVPSRFSGSGYGTDFTLTISSLQPEDFATYYCQPSFLYPYTFGQGTKVENRR

SEQ ID NO: 237 - protein, 108 aa, Homo sapiens
DIQMTQSPSSLSASVGDRVIITCRASQDIYLNLNWYQQKPGKAPKLLIYGTSNLQSGVPSRFSGSGSGTDFTLTISSLQPEDFATYYCQPSFVFPYTFGQGTKVEIRR

SEQ ID NO: 238 - protein, 108 aa, Homo sapiens
DIQMTQSPSSLSASVGDRVTITCRASQDIYLNLDWYQQKPGEAPKLLIYGTSNLQSGVPSRFSGSGSGTDFTLTISSLQPEDFATYYCQPSFLFPYTFGQGTKVEIRR

SEQ ID NO: 239 - protein, 108 aa, Homo sapiens
DIQMTQSPSSLSASVGDRVTITCRASQDIYLNLNWYQQKPGKAPKLLIYGTSNLQSGVPSRFSGSGYGTNFTLTISSLQPEDFATYYCQPSFLYPYTFGQGTKVEIRR

SEQ ID NO: 240 - protein, 108 aa, Homo sapiens
DIQMTQSPSSLSASVGDRVTITCRASQDIYLNLNWYQQKPEKAPKLLIYGTSNLQSGVPSRFSGSGSGTDFTLTISSLQPEDFATYYCQPSFLYPYTFGQGTKVEIRR

SEQ ID NO: 241 - protein, 108 aa, Homo sapiens
DIQMTQSPSSLSASVGDRVTITCRASQDIYLNLNWYQQKPGTAPKLLIYGTSNLQSGVPSRFSGSGSGTDFTLTISSLQPEDFATYYCQPSFLYPYTFGQGTKVEIRR

SEQ ID NO: 242 - protein, 108 aa, Homo sapiens
DIQMTQSPSSLFASVGDRVTITCRASQDIYLNLNWYQQKPGKAPKLLIHGTSNLQSGVPSRFSGSGSGTDFTLTISSLQPEDFATYYCQPSFLYPYTFGQGTKVEIRR

SEQ ID NO: 243 - protein, 108 aa, Homo sapiens
DIQMTQSPSSLSASVGDRVTITCRASQDIYLNLNWYQQKPGKAPKLLIYGTSNLQSGVPSRFSGSGSGADFTLTISSLQPEDFATYYCQPSFLYPYTFGQGTKVEIRR

SEQ ID NO: 244 - protein, 108 aa, Homo sapiens
DIQMTQSPSSLSASVGDRVTITCRASQDIYLNLDWYQQKPGKAPKLLIYGSSYLQSGVPSRFSGSGSGTDFTLTISSLQPEDFATYYCQPSFYFPYTFGQGTKVEIRR

SEQ ID NO: 245 - protein, 108 aa, Homo sapiens
DIQMTQSPSSLSASVGDRVTITCRASQDIYLNLDWYQQKPGKAPKLLIRGVSELQSGVPSRFSGSGSGTEFTLTISSLQPEDFATYYCQPSFYFPYTFGQGTKVEIRR

SEQ ID NO: 246 - protein, 108 aa, Homo sapiens
DIQMTQSPSSLSASVGDRVTITCRASQDIYLNLDWYQQKPGKAPKLLISLASELQSGVPSRFSGSGSGTDFTLTISSLQPEDFATYYCQPSFYFPYTFGQGTKVEIRR

SEQ ID NO: 247 - protein, 108 aa, Homo sapiens
DIQMTQSPSSLSASVGDRVTITCRASQDIYLNLDWYQQKPGKAPKLLIGLTSDLQSGVPSRFSGSGSGTDFTLTISSLQPEDFATYYCQPSFYFPYTFGQGTKVEIRR

SEQ ID NO: 248 - protein, 108 aa, Homo sapiens
DIQMTQSPSSLSASVGDRVTITCRASQDIYLNLDWYQQKPGKAPKLLIYGTSNLQSGVPSRFSGSGYGTDFTLTISSLQPEDFATYYCQPSFYFPYTFGQGTKLEIRR

SEQ ID NO: 249 - protein, 108 aa, Homo sapiens
DIQMTQAPSSLSASVGDRVTITCRASQDIYLNLDWYQQTPGNAPKLLIYGTSNLQSGVPSRFSGSGSGTDFTLTISSLQPEDFATYYCQPSFYFPYTFGQGTKVEIRR

SEQ ID NO: 250 - protein, 108 aa, Homo sapiens
DIQMTQSPSSLSASVGDRVTITCRASQVIYLNLDWYQQKPGKAPRLLIYGTSNLQSGVPSRFSGSGSGTDFTLTISSLQPEDFATYYCQPSFYFPYTFGQGTKVEIRR

SEQ ID NO: 251 - protein, 108 aa, Homo sapiens
DIQMTQSPSSLSASVGDRVTITCRASQDIYLNLDWYQQKPGKAPKLLIRTSSDLQSGVPSRFSGSGSGTDFTLTISSLQPEDFATYYCQPSFYFPYTFGQGTKVEIRR

SEQ ID NO: 252 - protein, 108 aa, Homo sapiens
DIQMTQSPSSLSASVGDRVTITCRASQDIYLNLDWYQQKPGKAPKLLITVGSELQSGVPSRFSGSGSGTDFTLTISSLQPEDFATYYCQPSFYFPYTFGQGTKVEIRR

SEQ ID NO: 253 - protein, 108 aa, Homo sapiens
DIQMTQSPSSLSASVGDRVTITCRASQDIYLNLDWYQQKPGKAPKLLIALVSELQSGVPSRFSGSGSGTDFTLTISSLQPEDFATYYCQPSFYFPYTFGQGTKVEIRR

SEQ ID NO: 254 - protein, 108 aa, Homo sapiens
DIQMTQSPSSLSASVGDRVTITCRASQDIYLNLDWYQQKPGKAPKLLIHHCSELQSGVPSRFSGSGSGTDFTLTISSLQPEDFATYYCQPSFYFPYTFGQGTKVEIRR

SEQ ID NO: 255 - protein, 108 aa, Homo sapiens
DIQMTQSPSSLSASVGDRVTITCRASQDIYLNLDWYQQKPGKASKLLISSSSDLQSGVPSRFSGSGSGTDFTLTISSLQPEDFATYYCQPSFYFPYTFGQGTKVEIRR

SEQ ID NO: 256 - protein, 108 aa, Homo sapiens
DIQMTQSPSSLSASVGDRVTITCRASQDIYLNLDWYQQKPGKAPKLLISLVSDLQSGVPSRFSGSGSGTDFTLTISSLQPEDFATYYCQPSFYFPYTFGQGTKVEIRR

SEQ ID NO: 257 - protein, 108 aa, Homo sapiens
DIQMTQSPPSLSASVGDRVTITCRASQDIYLNLDWYQQKPGKAPKLLISLSSDLQSGVPSRFSGSGSGTDFTLTISSLQPEDFATYYCQPSFYFPYAFGQGTKVEIRR

SEQ ID NO: 258 - protein, 108 aa, Homo sapiens
DIQMTQSPSSLSASVGDRVTITCRASQDIYLNLDWYQQKPGKAPKLLILYSSELQSGVPSRFSGSGSGTDFTLTISSLQPEDFATYYCQPSFYFPYTFGQGTKVEIRR

SEQ ID NO: 259 - protein, 108 aa, Homo sapiens; identical to SEQ ID NO: 4

SEQ ID NO: 260 - protein, 108 aa, Homo sapiens
DIQMTQSPSSLSASVGDRVTITCRASQDIYLNLDWYQQKPGKAPKLLISWSSFLQSGVPSRFSGSGSGTDFTLTISSLQPEDFATYYCQPSFYFPYTFGQGTKVEIRR

SEQ ID NO: 261 - protein, 108 aa, Homo sapiens
DIQMTQSPSSLSASVGDRVTITCRASQDIYLNLDWYQQKPGEAPKLLIYGTSDLQSGVPSRFSGSGSGTDFTLTISSLQPEDFATYYCQPSFYFPYTFGQGTKVEIRR

SEQ ID NO: 262 - protein, 108 aa, Homo sapiens
DIQMTQSPSSLSASVGDRVTITCRASQDIYLNLDWYQQKPGKAPKLLIYGTSDLQSGVPSRFSGSGYGTDFTLTISSLQPEDFATYYCQPSFYFPYTFGQGTKVEIRR

SEQ ID NO: 263 - protein, 108 aa, Homo sapiens
DIQMTQSPSSLSASVGDRVTITCRASQDIYLNLDWYQQKPGEAPKLLINFGSELQSGVPSRFSGSGSGTDFTLTISSLQPEDFATYYCQPSFYFPYTFGQGTKVEIRR

SEQ ID NO: 264 - protein, 108 aa, Homo sapiens; identical to SEQ ID NO: 5

SEQ ID NO: 265 - protein, 108 aa, Homo sapiens
DIQMTQSPSSLSASVGDRVTITCRASQDIYLNLDWYQQKPGKAPKLLIYFGSELQSGVPSRFSGSGSGTDFTLTISSLQPEDFATYYCQPSFYFPYTFGQGTKVEIRR

SEQ ID NO: 266 - protein, 108 aa, Homo sapiens; identical to SEQ ID NO: 6

SEQ ID NO: 267 - protein, 108 aa, Homo sapiens; identical to SEQ ID NO: 7

SEQ ID NO: 268 - protein, 108 aa, Homo sapiens
DIQMTQSPSSLSASVGDRVTITCRASQLIYLNLDWYQQKPGKAPKLLINFGSELQSGVPSRFSGSGYGTDFTLTISSLQPEDFATYYCQPSFYFPYTFGQGTKVEIKR

SEQ ID NO: 269 - protein, 108 aa, Homo sapiens
DIQMTQSPSSLSASVGDRVTITCRASQRIYLNLDWYQQKPGKAPKLLINFGSELQSGVPSRFSGSGYGTDFTLTISSLQPEDFATYYCQPSFYFPYTFGQGTKVEIKR

SEQ ID NO: 270 - protein, 108 aa, Homo sapiens
DIQMTQSPSSLSASVGDRVTITCRASQAIYLNLDWYQQKPGKAPKLLINFGSELQSGVPSRFSGSGYGTDFTLTISSLQPEDFATYYCQPSFYFPYTFGQGTKVEIKR

SEQ ID NO: 271 - protein, 108 aa, Homo sapiens
DIQMTQSPSSLSASVGDRVTITCRASQQIYLNLDWYQQKPGKAPKLLINFGSELQSGVPSRFSGSGYGTDFTLTISSLQPEDFATYYCQPSFYFPYTFGQGTKVEIKR

SEQ ID NO: 272 - protein, 108 aa, Homo sapiens
DIQMTQSPSSLSASVGDRVTITCRASQTIYLNLDWYQQKPGKAPKLLINFGSELQSGVPSRFSGSGYGTDFTLTISSLQPEDFATYYCQPSFYFPYTFGQGTKVEIKR

SEQ ID NO: 273 - protein, 108 aa, Homo sapiens
DIQMTQSPSSLSASVGDRVTITCRASQSIYLNLDWYQQKPGKAPTLLINFGSELQSGVPSRFSGSGYGTDFTLTISSLQPEDFATYYCQPSFYFPYTFGQGTKVEIKR

SEQ ID NO: 274 - protein, 108 aa, Homo sapiens
DIQMTQSPSSLSASVGDRVTITCRASQDIYLNLDWYQQKPGKAPKLLINFGSELQSGVPSRFSGSGYGTDFTLTISSLQPEDFATYYCQPAFYFPYTFGQGTKVEIKR

SEQ ID NO: 275 - protein, 108 aa, Homo sapiens
DIQMTQSPSSLSASVGDRVTITCRASQDIYLNLDWYQQKPGKAPKLLINFGSELQSGVPSRFSGSGYGTDFTLTISSLQPEDFATYYCQPGFYFPYTFGQGTKVEIKR

SEQ ID NO: 276 - protein, 108 aa, Homo sapiens
DIQMTQSPSSLSASVGDRVTITCRASQDIYLNLDWYQQKPGKAPKLLINFGSELQSGVPSRFSGSGYGTDFTLTISSLQPEDFATYYCQPSYYFPYTFGQGTKVEIKR

SEQ ID NO: 277 - protein, 108 aa, Homo sapiens
DIQMTQSPSSLSASVGDRVTITCRASQDIYLNLDWYQQKPGKAPKLLINFGSELQSGVPSRFSGSGYGTDFTLTISSLQPEDFATYYCQPSGYFPYTFGQGTKVEIKR

SEQ ID NO: 278 - protein, 108 aa, Homo sapiens
DIQMTQSPSSLSASVGDRVTITCRASQDIYLNLDWYQQKPGKAPKLLINFGSELQSGVPSRFSGSGYGTDFTLTISSLQPEDFATYYCQPSFAFPYTFGQGTKVEIKR

SEQ ID NO: 279 - protein, 108 aa, Homo sapiens
DIQMTQSPSSLSASVGDRVTITCRASQDIYLNLDWYQQKPGKAPKLLINFGSELQSGVPSRFSGSGYGTDFTLTISSLQPEDFATYYCQPSFLFPYTFGQGTKVEIKR

SEQ ID NO: 280 - protein, 108 aa, Homo sapiens
DIQMTQSPSSLSASVGDRVTITCRASQDIYLNLDWYQQKPGKAPKLLINFGSELQSGVPSRFSGSGYGTDFTLTISSLQPEDFATYYCQPSFYHPYTFGQGTKVEIKR

SEQ ID NO: 281 - protein, 108 aa, Homo sapiens
DIQMTQSPSSLSASVGDRVTITCRASQDIYLNLDWYQQKPGKAPKLLINFGSELQSGVPSRFSGSGYGTDFTLTISSLQPEDFATYYCQPSFYWPYTFGQGTKVEIKR

SEQ ID NO: 282 - protein, 108 aa, Homo sapiens
DIQMTQSPSSLSASVGDRVTITCRASQDIYLNLDWYQQKPGKAPKLLINFGSELQSGVPSRFSGSGYGTDFTLTISSLQPEDFATYYCQPSFYFPPTFGQGTKVEIKR

SEQ ID NO: 283 - protein, 108 aa, Homo sapiens
DIQMTQSPSSLSASVGDRVTITCRASQDIYLNLDWYQQKPGKAPKLLINFGSELQSGVPSRFSGSGWGTDFTLTISSLQPEDFATYYCQPSFYFPYTFGQGTKVEIKR

SEQ ID NO: 284 - protein, 108 aa, Homo sapiens
DIQMTQSPSSLSASVGDRVTITCRASQDIFLNLDWYQQKPGKAPKLLINFGSELQSGVPSRFSGSGYGTDFTLTISSLQPEDFATYYCQPSFYFPYTFGQGTKVEIKR

SEQ ID NO: 285 - protein, 108 aa, Homo sapiens
DIQMTQSPSSLSASVGDRVTITCRASQDIYLNLMWYQQKPGKAPKLLINFGSELQSGVPSRFSGSGYGTDFTLTISSLQPEDFATYYCQPSFYFPYTFGQGTKVEIKR

SEQ ID NO: 286 - protein, 108 aa, Homo sapiens
DIQMTQSPSSLSASVGDRVTITCRASQDIYLNLLWYQQKPGKAPRLLINFGSELQSGVPSRFSGSGYGTDFTLTISSLQPEDFATYYCQPSFYFPYTFGQGTKVEIKR

SEQ ID NO: 287 - protein, 108 aa, Homo sapiens
DIQMTQSPSSLSASAGDRVTITCRASQDIYLNLMWYQQKPGKAPKLLINFGSELQSGVPSRFSGSGYGTDFTLTISSLQPEDFATYYCQPSFYFPYTFGQGTKVEIKR

SEQ ID NO: 288 - protein, 108 aa, Homo sapiens
DIQMTQSPSSLSASVGDRVTITCRASQDIYLNLAWYQQKPGKAPKLLINFGSELQSGVPSRFSGSGYGTDFTLTISSLQPEDFATYYCQPSFYFPYTFGQGTKVEIKR

SEQ ID NO: 289 - protein, 108 aa, Homo sapiens
DIQMTQSPSSLSASVGDRVTITCRASQDIYLNLLWYQQKPGKAPKLLINFGSELQSGVPSRFSGSGYGTDFTLTISSLQPEDFATYYCQPSFYFPYTFGQGTKVEIKR

SEQ ID NO: 290 - protein, 108 aa, Homo sapiens
DIQMTQSPSSLSASVGDRVTITCRASQDIYLNLTWYQQKPGKAPKLLINFGSELQSGVPSRFSGSGYGTDFTLTISSLQPDDFATYYCQPSFYFPYTFGQGTKVEIKR

SEQ ID NO: 291 - protein, 108 aa, Homo sapiens
DIQMTQSPSSLSASVGDRVTITCRASQDIYLNLPWYQQKPGKAPKLLINFGSELQSGVPSRFSGSGYGTDFTLTISSLQPEDFATYYCQPSFYFPYTFGQGTKVEIKR

SEQ ID NO: 292 - protein, 108 aa, Homo sapiens
DIQMTQSPSSLSASVGDRVTITCRASQDIYLNLKWYQQKPGKAPKLLINFGSELQSGVPSRFSGSGYGTDFTLTISSLQPEDFATYYCQPSFYFPYTFGQGTKVEIKR

SEQ ID NO: 293 - protein, 108 aa, Homo sapiens
DIQMTQSPSSLSASVGDRVTITCRASQDIYLNLTWYQQKPGKAPKLLINFGSELQSGVPSRFSGSGYGTDFTLTISSLQPEDFATYYCQPSFYFPYTFGQGTKVEIKR

SEQ ID NO: 294 - protein, 108 aa, Homo sapiens
DIQMTQSPSSLSASVGDRVTITCRASQDIYLNLEWYQQKPGKAPKLLINFGSELQSGVPSRFSGSGYGTDFTLTISSLQPEDFATYYCQPSFYFPYTFGQGTKVEIKR

SEQ ID NO: 295 - protein, 108 aa, Homo sapiens
DIQMTQSPSSLSASVGDRVTITCRASQDIYLNLDWYQQKPGKAPKLLINFGSELTSGVPSRFSGSGYGTDFTLTISSLQPEDFATYYCQPSFYFPYTFGQGTKVEIKR

SEQ ID NO: 296 - protein, 108 aa, Homo sapiens
DIQMTQSPSSLSASVGDRVTITCRASQDIYLNLDWYQQKPGKAPKLLINFGSELNSGVPSRFSGSGYGTDFTLTISSLQPEDFATYYCQPSFYFPYTFGQGTKVEIKR

SEQ ID NO: 297 - protein, 108 aa, Homo sapiens
DIQMTQSPSSLSASVGDRVTITCRASQDIYLNLDWYQQKPGKAPKLLINFGSELYSGVPSRFSGSGYGTDFTLTISSLQPEDFATYYCQPSFYFPYTFGQGTKVEIKR

SEQ ID NO: 298 - protein, 108 aa, Homo sapiens
DIQMTQSPSSLSASVGDRVTITCRASQDIYLNLDWYQQKPGKAPKLLINFGSELFSGVPSRFSGSGYGTDFTLTISSLQPEDFATYYCQPSFYFPYTFGQGTKVEIKR

SEQ ID NO: 299 - protein, 108 aa, Homo sapiens
DIQMTQSPSSLSASVGDRVTITCRASQDIYLNLDWYQQKPGKAPKLLINFGSELLSGVPSRFSGSGYGTDFTLTISSLQPEDFATYYCQPSFYFPYTFGQGTKVEIKR

SEQ ID NO: 300 - protein, 108 aa, Homo sapiens
DIQMTQSPSSLSASVGDRVTITCRASQDIYLNLDWYQQKPGKAPKLLINFGSELRSGVPSRFSGSGYGTDFTLTISSLQPEDFATYYCQPSFYFPYTFGQGTKVEIKR

SEQ ID NO: 301 - protein, 108 aa, Homo sapiens
DIQMTQSPSSLSASVGDRVTITCRASQDIYLNLDWYQQKPGKAPKLLINFGSELPSGVPSRFSGSGYGTDFTLTISSLQPEDFATYYCQPSFYFPYTFGQGTKVEIKR

SEQ ID NO: 302 - protein, 108 aa, Homo sapiens
DIQMTQSPSSLSASVGDRVTITCRASQDIYLNLDWYQQKPGKAPKPLINFGSELQPGVPSRFSGSGYGTDFTLTISSLQPEDFATYYCQPSFYFPYTFGQGTKVEIKR

SEQ ID NO: 303 - protein, 108 aa, Homo sapiens
DIQMTQSPSSLSASVGDRVTITCRASQDIYLNLDWYQQKPGKAPKLLINFGSELQPGVPSRFSGSGYGTDFTLTISSLQPEDFATYYCQPSFYFPYTFGQGTKVEIKR

SEQ ID NO: 304 - protein, 108 aa, Homo sapiens
DIQMTQSPSSLSASVGDRVTITCRASQDIYLNLDWYQQKPGKAPKLLINFGSELQHGVPSRFSGSGYGTDFTLTISSLQPEDFATYYCQPSFYFPYTFGQGTKVEIKR

SEQ ID NO: 305 - protein, 108 aa, Homo sapiens
DIQMTQSPSSLSASVGDRVTITCRASQDIYLNLDWYQQKPGKAPKLLINFGSELQLGVPSRFSGGGYGTDFTLTISSLQPEDFATYYCQPSFYFPYTFGQGTKVEIKR

SEQ ID NO: 306 - protein, 108 aa, Homo sapiens
DIQMTQSPSSLSASVGDRVTITCRASQDIYLNLDWYQQKPGKAPKLLINFGSELQKGVPSRFSGSGYGTDFTLTISSLQPEDFATYYCQPSFYFPYTFGQGTKVEIKR

SEQ ID NO: 307 - protein, 108 aa, Homo sapiens
DIQMTQSPSSLSASVGDRVTITCRASQDIYLNLDWYQQKPGKAPKLLINFGSELQFGVPSRFSGSGYGTDFTLTISSLQPEDFATYYCQPSFYFPYTFGQGTKVEIKR

SEQ ID NO: 308 - protein, 108 aa, Homo sapiens
DIQMTQSPSSLSASVGDRVTITCRASQDIYLNLDWYQQKPGKAPKLLINFGSELQQGVPSRFSGSGYGTDFTLTISSLQPEDFATYYCQPSFYFPYTFGQGTKVEIKR

SEQ ID NO: 309 - protein, 108 aa, Homo sapiens
DIQMTQSPSSLSASVGDRVTITCRASQDIYLNLDWYQQKPGKAPKLLINFGSELQSGVPSRFSGSGYGTDFTLTISSLQPEDFATYYCTPSFYFPYTFGQGTKVEIKR

SEQ ID NO: 310 - protein, 108 aa, Homo sapiens
DIQMTQSPSSLSASVGDRVTITCRASQDIYLNLDWYQQKPGKAPKLLINFGSELQSGVPSRFSGSGYGTDFTLTISSLQPEDFATYYCKPSFYFPYTFGQGTKVEIKR

SEQ ID NO: 311 - protein, 108 aa, Homo sapiens
DIQMTQSPSSLSASVGDRVTITCRASQDIYLNLDWYQQKPGKAPKLLINFGSELQSGVPSRFSGSGYGTDFTLTISSLQPEDFAMYYCAPSFYFPYTFGQGTKVEIKR

SEQ ID NO: 312 - protein, 108 aa, Homo sapiens
DIQMTQSPSSLSASVGDRVTITCRASQDIYLNLDWYQQKPGKAPKLLINFGSELQSGVPSRFSGSGYGTDFTLTISSLQPEDFATYYCSPSFYFPYTFGQGTKVEIKR

SEQ ID NO: 313 - protein, 108 aa, Homo sapiens
DIQMTQSPSSLSASVGDRVTITCRASQDIYLNLDWYQQKPGKAPKLLINFGSELQSGVPSRFSGSGYGTDFTLTISSLQPEDFATYYCLPSFYFPYTFGQGTKVEIKR

SEQ ID NO: 314 - protein, 108 aa, Homo sapiens
DIQMTQSPSSLSASVGDRVTITCRASQDIYLNLDWYQQKPGKAPKLLINFGSELQSGVPSRFSGSGYGTDFTLTISSLQPEDFATYYCQASFYFPYTFGQGTKVEIKR

SEQ ID NO: 315 - protein, 108 aa, Homo sapiens
DIQMTQSPSSLSASVGDRVTITCRASQDIYLNLDWYQQKPGKAPKLLINFGSELQSGVPSRFSGSGYGTDFTLTISGLQPEDFATYYCQASFYFPYTFGQGTKVEIKR

SEQ ID NO: 316 - protein, 108 aa, Homo sapiens
DIQMTQSPSSLSASVGDRVTITCRASQDIYLNLDWYQQKPGKAPKLLINFGSELQSGVPSRFSGSGYGTDFTLTISSLQPEDFATYYCQGSFYFPYTFGQGTKVEIKR

SEQ ID NO: 317 - protein, 108 aa, Homo sapiens
DIQMTQSPSSLSASVGDRVTITCRASQDIYLNLDWYQQKPGKAPKLLISFGSELQSGVPSRFSGSGYGTDFTLTISSLQPEDFATYYCQPSFYFPYTFGQGTKVEIKR

SEQ ID NO: 318 - protein, 108 aa, Homo sapiens
DIQMTQSPSSLSASVGDRVTITCRASQDIYLNLDWYQQKPGKAPKLLITFGSELQSGVPSRFSGSGYGTDFTLTISSLQPEDFATYYCQPSFYFPYTFGQGTKVEIKR

SEQ ID NO: 319 - protein, 108 aa, Homo sapiens
DIQMTQSPSSLSASVGDRVTITCRASQDIYLNLDWYQQKPGKAPKLLIMFGSELQSGVPSRFSGSGYGTDFTLTISSLQPEDFATYYCQPSFYFPYTFGQGTKVEIKR

SEQ ID NO: 320 - protein, 108 aa, Homo sapiens
DIQMTQSPSSLSASVGDRVTITCRASQDIYLNLDWYQQKPGKAPKLLIVFGSELQSGVPSRFSGSGYGTDFTLTISSLQPEDFATYYCQPSFYFPYTFGQGTKVEIKR

SEQ ID NO: 321 - protein, 108 aa, Homo sapiens
DIQMTQSPSSLSASVGDRVTITCRASQDIYLNLDWYQQKPGKAPKLLIKFGSELQSGVPSRFSGSGYGTDFTLTISSLQPEDFATYYCQPSFYFPYTFGQGTKVEIKR

SEQ ID NO: 322 - protein, 108 aa, Homo sapiens
DIQMTQSPSSLSASVGDRVTITCRASQDIYLNLDWYQQKPGKAPKLLISFGSELQSGVPSRFRGSGYGTDFTLTISSLQPEDFATYYCQPSFYFPYTFGQGTKVEIKR

SEQ ID NO: 323 - protein, 108 aa, Homo sapiens
DIQMTQSPSSLSASVGDRVTITCRASQDIYLNLDWYQQKPGKAPKLLINYGSELQSGVPSRFSGSGYGTDFTLTISSLQPEDFATYYCQPSFYFPYTFGQGTKVEIKR

SEQ ID NO: 324 - protein, 108 aa, Homo sapiens
DIQMTQSPSSLSASVGDRVTITCRASQDIYLNLDWYQQKPGKAPKLLINSGSELQSGVPSRFSGSGYGTDFTLTISSLQPEDFATYYCQPSFYFPYTFGQGTKVEIKR

SEQ ID NO: 325 - protein, 108 aa, Homo sapiens
DIQMTQSPSSLSASVGDRVTITCRASQDIYLNLDWYQQKPGKAPKLLINLGSELQSGVPSRFSGSGYGTDFTLTISSLQPEDFATYYCQPSFYFPYTFGQGTKVEIKR

SEQ ID NO: 326 - protein, 108 aa, Homo sapiens
DIQMTQSPSSLSASVGDRVTITCRASQDIYLNLDWYQQKPGKAPKLLINGGSELQSGVPSRFSGSGYGTDFTLTISSLQPEDFATYYCQPSFYFPYTFGQGTKVEIKR

SEQ ID NO: 327 - protein, 108 aa, Homo sapiens
DIQMTQSPSSLSASVGDRVTITCRASQDIYPNLDWYQQKPGKAPKLLINSGSELQSGVPSRFSGSGYGTDFTLTISSLQPEDFATYYCQPSFYFPYTFGQGTKVEIKR

SEQ ID NO: 328 - protein, 108 aa, Homo sapiens; identical to SEQ ID NO: 325

SEQ ID NO: 329 - protein, 108 aa, Homo sapiens
DIQMTQSPSSLSASVGDRVTITCRASQDIYLNLDWYQQKPGKAPKLLINFSSELQSGVPSRFSGSGYGTDFTLTISSLQPEDFATYYCQPSFYFPYTFGQGTKVEIKR

SEQ ID NO: 330 - protein, 108 aa, Homo sapiens
DIQMTQSPSSLSASVGDRVTITCRASQDIYLNLDWYQQKPGKAPKLLINFASELQSGVPSRFSGSGYGTDFTLTISSLQPEDFATYYCQPSFYFPYTFGQGTKVEIKR

SEQ ID NO: 331 - protein, 108 aa, Homo sapiens
DIQMTQSPSSLSASVGDRVTITCRASQDIYLNLDWYQQKPGKAPKLLINFVSELQSGVPSRFSGSGYGTDFTLTISSLQPEDFATYYCQPSFYFPYTFGQGTKVEIKR

SEQ ID NO: 332 - protein, 108 aa, Homo sapiens
DIQMTQSPSSLSASVGDRVTITCRASQDIYLNLDWYQQKPGKAPKLLINFGSSLQSGVPSRFSGSGYGTDFTLTISSLQPEDFATYYCQPSFYFPYTFGQGTKVEIKR

SEQ ID NO: 333 - protein, 108 aa, Homo sapiens
DIQMTQSPSSLSASVGDRVTITCRASQDIYLNLDWYQQKPGKAPKLLINFGSALQSGVPSRFSGSGYGTDFTLTISSLQPEDFATYYCQPSFYFPYTFGQGTKVEIKR

SEQ ID NO: 334 - protein, 108 aa, Homo sapiens
DIQMTQSPSSLSASVGDRVTITCRASQDIYLNLDWYQQKPGKAPKLLINFGSTLQSGVPSRFSGSGYGTDFTLTISSLQPEDFATYYCQPSFYFPYTFGQGTKVEIKR

SEQ ID NO: 335 - protein, 108 aa, Homo sapiens
DIQMTQSPSSLSASVGDRVTITCRASQDIYLNLDWYQQKPGKAPKLLINFGSDLQSGVPSRFSGSGYGTDFTLTISSLQPEDFATYYCQPSFYFPYTFGQGTKVEIKR

SEQ ID NO: 336 - protein, 108 aa, Homo sapiens
DIQMTQSPSSLSASVGDRVTITCRASQDIYLNLDWYQQKPGKAPKLLISFGSELRSGVPSRFSGSGYGTDFTLTISSLQPEDFATYYCQPSFYFPYTFGQGTKVEIKR

SEQ ID NO: 337 - protein, 108 aa, Homo sapiens
DIQMTQSPSSLSASVGDRVTITCRASQDIYLNLDWYQQKPGKAPKLLISFGSELQPGVPSRFSGSGYGTDFTLTISSLQPEDFATYYCQPSFYFPYTFGQGTKVEIKR

SEQ ID NO: 338 - protein, 108 aa, Homo sapiens
DIQMTQSPSSLSASVGDRVTITCRASQDIYLNLDWYQQKPGKAPKLLISFGSELRPGVPSRFSGSGYGTDFTLTISSLQPEDFATYYCQPSFYFPYTFGQGTKVEIKR

SEQ ID NO: 339 - protein, 108 aa, Homo sapiens
DIQMTQSPSSLSASVGDRVTITCRASQDIYLNLDWYQQKPGKAPKLLINFGSELRPGVPSRFSGSGYGTDFTLTISSLQPEDFATYYCQPSFYFPYTFGQGTKVEIKR

SEQ ID NO: 340 - protein, 108 aa, Homo sapiens
DIQMTQSPSSLSASVGDRVTITCRASQDIYLNLDWYQQKPGKAPKLLISFGSELQKGVPSRFSGSGYGTDFTLTISSLQPEDFATYYCQPSFYFPYTFGQGTKVEIKR

SEQ ID NO: 341 - protein, 108 aa, Homo sapiens
DIQMTQSPSSLSASVGDRVTITCRASQDIYLNLDWYQQKPGKAPKLLISFGSELRKGVPSRFSGSGYGTDFTLTISSLQPEDFATYYCQPSFYFPYTFGQGTKVEIKR

SEQ ID NO: 342 - protein, 108 aa, Homo sapiens
DIQMTQSPSSLSASVGDRVTITCRASQDIYLNLDWYQQKPGKAPKLLINFGSELRKGVPSRFSGSGYGTDFTLTISSLQPEDFATYYCQPSFYFPYTFGQGTKVEIKR

SEQ ID NO: 343 - protein, 108 aa, Homo sapiens
DIQMTQSPSSLSASVGDRVTITCRASQTIYLNLDWYQQKPGKAPKLLISFGSELQKGVPSRFSGSGYGTDFTLTISSLQPEDFATYYCQPSFYFPYTFGQGTKVEIKR

SEQ ID NO: 344 - protein, 108 aa, Homo sapiens
DIQMTQSPSSLSASVGDRVTITCRASQTIYLNLDWYQQKPGKAPKLLINFGSELQSGVPSRFSGSGYGTDFTLTISSLQPEDFATYYCQPAFYFPYTFGQGTKVEIKR

SEQ ID NO: 345 - protein, 108 aa, Homo sapiens
DIQMTQSPSSLSASVGDRVTITCRASQDIYLNLDWYQQKPGKAPKLLISFGSELQKGVPSRFSGSGYGTDFTLTISSLQPEDFATYYCQQAFYFPYTFGQGTKVEIKR

SEQ ID NO: 346 - protein, 108 aa, Homo sapiens
DIQMTQSPSSLSASVGDRVTITCRASQTIYLNLDWYQQKPGKAPKLLISFGSELQKGVPSRFSGSGYGTDFTLTISSLQPEDFATYYCQQAFYFPYTFGQGTKVEIKR

SEQ ID NO: 347 - protein, 108 aa, Homo sapiens
DIQMTQSPSSLSASVGDRVTITCRASQQIYNALRWYQQKPGKARKLLIYHKSQLQSGVPSRFSGSGSGTDFTLTISSLQPEDFATYYCQQTYSFPHTFGQGTKVEIKR

SEQ ID NO: 348 - protein, 108 aa, Homo sapiens
DIKMTQSPSSLSASVGDRVTITCRASQNIGRELRWYQQKPGKAPKLLIYHASHLQSGVPSRFSGSGSGTDFTLTISSLQPEDFATYYCQQYYYFPLTFGQGTKVEIKR

SEQ ID NO: 349 - protein, 108 aa, Homo sapiens; identical to SEQ ID NO: 348

SEQ ID NO: 350 - DNA, 324 bp, Homo sapiens
gacatccagatgacccagtctccatcctccctgtcagcatctgtaggagaccgtgtcaccatcacttgccgggcaagtcagtggattggtagggagttacgttggtaccagcagaaaccagggaaagcccctatgttcctgatctatcatgcgtccaggttgcaaagaggggtcccatcacgtttcagtggcagtggatctgggacagatttcactctcactatcagcagtctgcaacctgaagattttgctacgtactactgtcaacagtatcatgggtggcctctgacgttcggccaagggaccaaggtggaaatcaaacgg

SEQ ID NO: 351 - DNA, 324 bp, Homo sapiens
gacatccagatgacccagtctccatcctccctgtcagcatctgtaggagaccgtgtcaccatcacttgccgggcaagtcagtggattggtagggagttacgttggtaccagcagaaaccagggaaagcccctaagttcctgatctatcatgcgtccaggttgcaaagaggggtcccatcacgtttcagtggcagtggatctgggacagatttcactctcactatcagcagtctgcaacctgaagattttgctacgtactactgtcaacagtatcatgggtggcctctgacgttcggccaagggaccaaggtggaaatcaaacgg

SEQ ID NO: 352 - DNA, 324 bp, Homo sapiens
gacatccagatgacccagtctccatcctccctgtctgcatctgtaggagaccgtgtcaccatcacttgccgggcaagtcaggatatttacctgaatttagactggtatcagcagaaaccagggaaagcccctaagctcctgatctatggtacgtccgatttgcaaagtggggtcccatcacgtttcagtggcagtggatctgggacagatttcactctcaccatcagcagtctgcaacctgaagatttcgctacgtactactgtcaaccgtctttttacttcccttatacgttcggccaagggaccaaggtggaaatcagacgg

SEQ ID NO: 353 - DNA, 324 bp, Homo sapiens
gacatccagatgacccagtctccatcctccctgtctgcatctgtaggagaccgtgtcaccatcacttgccgggcaagtcaggatatttacctgaatttagactggtatcagcagaaaccagggaaagcccctaagctcctgatcaattttggttccgagttgcaaagtggtgtcccatcacgtttcagtggcagtggatctgggacagatttcactctcaccatcagcagtctgcaacctgaagatttcgctacgtactactgtcaaccgtctttttacttcccttatacgttcggccaagggaccaaggtggaaatcagacgg

SEQ ID NO: 354 - DNA, 324 bp, Homo sapiens
gacatccagatgacccagtctccatcctccctgtctgcatctgtaggagaccgtgtcaccatcacttgccgggcaagtcaggatatttacctgaatttagactggtatcagcagaaaccagggaaagcccctaagctcctgatcaattttggttccgagttgcaaagtggtgtcccatcacgtttcagtggcagtggatatgggacagatttcactctcaccatcagcagtctgcaacctgaagatttcgctacgtactactgtcaaccgtctttttacttcccttatacgttcggccaagggaccaaggtggaaatcagacgg

SEQ ID NO: 355 - DNA, 324 bp, Homo sapiens
gacatccagatgacccagtctccatcctccctgtctgcatctgtaggagaccgtgtcaccatcacttgccgggcaagtcaggatatttacctgaatttagactggtatcagcagaaaccagggaaagcccctaagctcctgatcaattttggttccgagttgcaaagtggtgtcccatcacgtttcagtggcagtggatctgggacagatttcactctcaccatcagcagtctgcaacctgaagatttcgctacgtactactgtcaaccgtctttttacttcccttatacgttcggccaagggaccaaggtggaaatcaaacgg

SEQ ID NO: 356 - DNA, 324 bp, Homo sapiens
gacatccagatgacccagtctccatcctccctgtctgcatctgtaggagaccgtgtcaccatcacttgccgggcaagtcaggatatttacctgaatttagactggtatcagcagaaaccagggaaagcccctaagctcctgatcaattttggttccgagttgcaaagtggtgtcccatcacgtttcagtggcagtggatatgggacagatttcactctcaccatcagcagtctgcaacctgaagatttcgctacgtactactgtcaaccgtctttttacttcccttatacgttcggccaagggaccaaggtggaaatcaaacgg

SEQ ID NO: 357 - DNA, 324 bp, Homo sapiens
gacatccagatgacccagtctccatcctccctgtctgcatctgtaggagaccgtgtcaccatcacttgccgggcaagtcagagcatttattattttttacattggtaccagcagaaaccagggaaagcccctaagctcctgatctatcgggcatcctctttgcaaagtggggtcccatcacgtttcagtggcagtggatctgggacagatttcactctcaccatcagcagtctgcaacctgaagattttgctacgtactactgtcaacaggtgtggcgtcctcctcttacgttcggccaagggaccaaggtggaaatcaaacgg

SEQ ID NO: 358 - DNA, 324 bp, Homo sapiens
gacatccagatgacccagtctccatcctccctgtctgcatctgtaggagaccgtgtcaccatcacttgccgggcaagtcagagcatttatcagagtttagattggtaccagcagaaaccagggaaagcccctaagctcctgatctattatgcatccgtgttgcaaagtggggtcccatcacgtttcagtggcagtggatctgggacagatttcactctcaccatcagcagtctgcaacctgaagattttgctacgtactactgtcaacagctgtctcgtccgccttttacgttcggccaagggaccaaggtggaaatcaaacgg

SEQ ID NO: 359 - DNA, 324 bp, Homo sapiens
gacatccagatgacccagtctccatcctccctgtctacatctgtaggagaccgtgtcaccatcacttgccgtgcaagtcagagcattgaggagatgttatattggtaccagcagaaaccagggaaagcccctaagctcctgatctataatgcatccaggttgcaaagtggggtcccatcacgtttcagtggcagtggatctgggacagatttcattctcaccatcagcagtctgcaacctgaagattttgctacgtactactgtcgacaggtggtgggtacgcctcatacgttcggccaagggaccaaggtggaaatcaaacgg

SEQ ID NO: 360 - DNA, 324 bp, Homo sapiens
gacatccagatgacccagtctccatcctccctgtctgcatctgtaggagaccgtgtcaccatcacttgccgggcaagtcagagcattgatgattatttaaattggtaccagcagaaaccagggaaagcccctaagctcctgatctattgggcatccaggttgcaaagtggggtcccatcacgtttcagtggcagtggatctgggacagatttcactctcaccatcagcagtctgcaacctgaagattttgctacgtactactgtcaacagaggtggttgacgccttcgacgttcggccaagggaccaaggtggaaatcaaacgg

SEQ ID NO: 361 - DNA, 324 bp, Homo sapiens
gacatccagatgacccagtctccatcctccctgtctgcatctgtaggagaccgtgtcaccatcacttgccgggcaagtcagagcattgaggagatgttatattggtaccagcagaaaccagggaaagcccctaagctcctgatctataatgcatccaggttgcaaagtggggtcccatcacgtttcagtggcagtggatctgggacagatttcactctcaccatcagcagtctgcaacctgaagattttgctacgtactactgtcgacaggtggtgggtacgcctcatacgttcggccaagggaccaaggtggaaatcaaacgg

SEQ ID NO: 362 - DNA, 324 bp, Homo sapiens
gacatccagatgacccagtctccatcctccctgtctgcatctgtaggagaccgtgtcaccatcacttgccgggcaagtcagagcattgatgattatttaaattggtaccagcagaaaccagggaaagcccctaagctcctgatctattgggcatccaggttgcaaagtggggtcccatcacgtttcagtggcagtggatctgggacagatttcactctcaccatcagtagtctgcaacctgaagattttgctacgtactactgtcaacagaagtggatgggtcctcatacgttcggccaagggaccaaggtggaaatcaaacgg

SEQ ID NO: 363 - DNA, 324 bp, Homo sapiens
gacatccagatgacccagtctccatcctccctgtctgcatctgtaggagaccgtgtcaccatcacttgccgggcaagtcagaacattgattgggggttagattggtaccagcagaaaccagggaaagcccctaagctcctgatctatatggcatcccgtttgcaaagtggggtcccatcacgtttcagtggcagtggatctgggacagatttcactctcaccatcagcagtctgcaacctgaagattttgctacgtactactgtcaacagttgagtatgtggccttttacgttcggccaagggaccaaggtggaaatcaaacgg

SEQ ID NO: 364 - DNA, 324 bp, Homo sapiens
gacatccagatgacccagtctccatcctccctgtctgcatctgtaggagaccgtgtcaccatcacttgccgggcaagtcagagcattctggattatttaagttggtaccagcagaaaccagggaaagcccctaagctcctgatctattgggcatccaagttgcaaagtggggtcccatcacgtttcagtggcagtggatctgggacagatttcactctcaccatcagcagtctgcaacctgaagattttgctacgtactactgtcaacagaagtggatgggtcctcatacgttcggccaagggaccaaggtggaaatcaaacgg

SEQ ID NO: 365 - DNA, 324 bp, Homo sapiens
gacatccagatgacccagtctccatcctccctgtctgcatctgtaggagaccgtgtcaccatcacttgccgggcaagtcagagcatttctgagtatttatattggtaccagcagaaaccagggaaagcccctaagctcctgatctatcatgcatccactttgcaaagtggggtcccatcacgtttcagtggcagtggatctgggacagatttcactctcaccatcagcagtctgcaacctgaagattttgctacgtactactgtcgacagtatctgcggcctcctttgacgttcggccaagggaccaaggtggaaatcaaacgg

SEQ ID NO: 366 - DNA, 324 bp, Homo sapiens
gacatccagatgacccagtctccatcctccctgtctgcatccgtaggagaccgtgtcaccatcacttgccgggcaagtcagtggattggggtgagtttaaattggtatcagcagaaaccagggaaagcccctaagctcctgatctatcagagttccctgttgcaaagtggggtcccatcacgtttcagtggcagtggatctgggacagatttcactctcaccatcagcagtctgcaacctgaagattttgctacgtactactgtcaacaggtgtatatttttccttttacgttcggccaagggaccaaggtggaaatcaaacgg

SEQ ID NO: 367 - DNA, 324 bp, Homo sapiens
gacatccagatgacccagtctccatcctccctgtctgcatctgtaggagaccgtgtcaccatcacttgccgggcaagtcagcctattgagcgttggttatattggtaccagcagaaaccagggaaagcccctaagctcctgatctatggtgcgtccgagttgcaaagtggggtcccatcacgtttcagtggcagaggatctgggacagatttcactctcaccatcagcagtctgcaacctgaagattttgctacgtactactgtcaacagtatcatgcgtatccttttacgttcggccaagggaccaaggtggaaatcaaacgg

SEQ ID NO: 368 - DNA, 324 bp, Homo sapiens
gacatccagatgacccagtctccatcctccctgtctgcatctgtaggagaccgtgtcaccatcacttgccgggcaagtcagaatattgagtggtatttaaattggtaccagcagaaaccagggaaagcccctaagctcctgatctatggttcgtccttgttgcaaagtggggtcccatcacgttttagtggcagtggatctgggacagatttcactctcaccatcagcagtctgcaacctgaagattttgctacgtactactgtcaacaggattggtcttctccttttacgttcggccaagggaccaaggtggaaatcaaacgg

SEQ ID NO: 369 - DNA, 324 bp, Homo sapiens
gacatccagatgacccagtctccatcctttctgtctgcatctgtaggagaccgtgtcaccatcacttgccgggcaagtcaggttattgggattacgttaaattggtatcagcagaaaccagggaaagcccctaagctcctgatctatcagggatccttgttgcaaagtggggtcccatcacgtttcagtggcagtggatctgggacagatttcactctcaccatcaacagtctgcaacctgaagattttgctacgtactactgtcaacagtcgtggcagacgccttttacgttcggccaagggaccaaggtggaaatcaaacgg

SEQ ID NO: 370 - DNA, 324 bp, Homo sapiens
gacatccagatgacccagtctccatcctccctgtctgcatctgtaggagaccgtgtcaccatcacttgccgggcaagtcaggagattcgtgctgcgttacagtggtaccagcagaaaccagggaaagcccctaagctcctgatctatcaggtttccattttgcaaagtggggtcccatcacgtttcagtggcagtggatctgggacagatttcactctcaccatcagcagtctgcaacctgaagattttgctacgtactactgtcaacagtctgataggtatccttttacgttcggccaagggaccaaggtggaaatcaaacgg

SEQ ID NO: 371 - DNA, 324 bp, Homo sapiens
gacatccagatgacccagtctccatcctccctgtctgcatctgtaggagaccgtgtcaccatcacttgccgggcaagtcagtatattgcggagtttttatattggtaccagcagaaaccagggaaagcccctaagctcctgatctataaggcttccattttgcaaagtggggtcccatcacgtttcagtggcagtggatctgggacagatttcactctcaccatcagcagtctgcaacctgaagatttcgctacgtactactgtcaacagtataatgcttatccttttacgttcggccaagggaccaaggtggaaatcaaacgg

SEQ ID NO: 372 - DNA, 357 bp, Homo sapiens
gaggtgcagctgttggagtctgggggaggcttggtacagcctggggggtccctgcgtctctcctgtgcagcctccggattcaccttttctgagtatcggatggcttgggtccgccaggctccagggaagggtctggagtgggtctcatctattgagggtgatggtcatattacatactacgcagactccgtgaagggccggttcaccatctcccgcgacaattccaagaacacgctgtatctgcaaatgaacagcctgcgtgccgaggataccgcggtatattactgtgcgaaatcggatatttcgtatgatcagtttgactactggggtcagggaaccctggtcaccgtctcgagc

SEQ ID NO: 373 - DNA, 357 bp, Homo sapiens
gaggtgcagctgttggagtctgggggaggcttggtacagcctggggggtccctgcgtctctcctgtgcagcctccggattcacctttgagatgtataagatggcgtgggtccgccaggctccagggaagggtctagagtgggtctcaactatttcgagtcgtggtggtacgacttactacgcagactccgtgaagggccggttcaccatctcccgcgacaattccaagaacacgctgtatctgcaaatgaacagcctgcgtgccgaggacaccgcggtatattactgtgcgaaatttcgtggtagtggggagtcgtttgactactggggtcagggaaccctggtcaccgtctcgagc

SEQ ID NO: 374 - DNA, 354 bp, Homo sapiens
gaggtgcagctgttggagtctgggggaggcttggtacagcctggggggtccctgcgtctctcctgtgcagcctccggattcacctttgggcgttatacgatgaattgggtccgccaggctccagggaagggtctagagtgggtctcatctattggtgcgcagggtcaggatacatactacgcagactccgtgaagggccggttcaccatctcccgcgacaattccaagaacacgctgtatctgcaaatgaacagcctgcgtgccgaggataccgcggtatattactgtgcgaaatataatagtaagcatgcgtttgactactggggtcagggaaccctggtcaccgtctcgagc

SEQ ID NO: 375 - DNA, 357 bp, Homo sapiens
gaggtgcagctgttggagtctgggggaggcttggtacagcctggggggtccctgcgtctctcctgtgcagcctccggattcacctttctgtcgtatcagatggcttgggtccgccaggctccagggaagggtctagagtgggtctcaacgattagtgggaatggtagtcgtacatactacgcagactccgtgaagggccggttcaccatctcccgcgacaattccaagaacacgctgtatctgcaaatgaacagcctgcgtgccgaggataccgcggtatattactgtgcgaaaagtgggccgaatggggggatgtttgactactggggccagggaaccctggtcaccgtctcgagc

SEQ ID NO: 376 - DNA, 324 bp, Homo sapiens
gacatccagatgacccagtctccatcctccctgtctgcatctgtaggagaccgtgtcaccatcacttgccgggcaagtcagagcattaatcaggtgttaaattggtaccagcagaaaccagggaaagcccctaagctcctgatctatcaggcatcccttttgcaaagtggggtcccatcacgtttcagtggcagtggatctgggacagatttcactctcaccatcagcagtctgcaacctgaagattttgctacgtactactgtcaacagttttggggttttccttttacgttcggccaagggaccaaggtggaaatcaaacgg

SEQ ID NO: 377 - DNA, 324 bp, Homo sapiens
gacatccagatgacccagtctccatcctccctgtctgcatctgtaggagaccgtgtcaccatcacttgccgggcaagtcagagcattgagcattggttatattggtaccagcagaaaccagggaaagcccctaagctcctgatctatcatgcatcccagttgcaaagtggggtcccatcacgtttcagtggcagtggatctgggacagatttcactctcaccatcagcagtctgcaacctgaagattttgctacgtactactgtcaacagtatcatttgccgcctatgacgttcggccaagggaccaaggtggaaatcaaacgg

SEQ ID NO: 378 - DNA, 324 bp, Homo sapiens
gacatccagatgacccagtctccatcctccctgtctgcatctgtaggagaccgtgtcaccatcacttgccgggcaagtcagagcattaaggtttatttacggtggtaccagcagaaaccagggaaagcccctaagctcctgatctataaggcatcccttttgcaaagtggggtcccatcacgtttcagtggcagtggatctgggacagatttcactctcaccatcagcagtctgcaacctgaagattttgctacgtactactgtcaacaggattttgatcatccttcgacgttcggccaagggaccaaggtggaaatcaaacgg

SEQ ID NO: 379 - DNA, 324 bp, Homo sapiens
gacatccagatgacccagtctccatcctccctgtctgcatctgtaggagaccgtgtcaccatcacttgccgggcaagtcagagcattgagttttttttatattggtaccagcagaaaccagggaaaacccctaagctcctgatctatcatgcatcctggttgcaaagtggggtcccatcacgtttcagtggcagtggatctgggacagatttcactctcaccatcagcagtctgcaacctgaagattttgctacgtactactgtcaacagtattttagttatcctttgacgttcggccaagggaccaaggtggaaatcaaacgg

SEQ ID NO: 380 - DNA, 324 bp, Homo sapiens
gacatccagatgacccagtctccatcctccctgtctgcatctgtagaggaccgtgtcaccatcacttgccgggcaagtcagagcatttattattttttacattggtaccagcagaaaccagggaaagcccctaagctcctgatctatcgggcatcctctttgcaaagtggggtcccatcacgtttcagtggcagtggatctgggacagatttcactctcaccatcagcagtctgcaacctgaagattttgctacgtactactgtcaacaggtgtggcgtcctcctcttacgttcggccaagggaccaaggtggaaatcaaacgg

SEQ ID NO: 381 - DNA, 324 bp, Homo sapiens
gacatccagatgacccagtctccatcctccctgtctgcatctgtaggagaccgtgtcaccatcacttgccgggcaagtcagagcattactgttgagttaaggtggtaccagcagaaaccagggaaagcccctaagctcctgatctatcatgcatcccgtttgcaaagtggggtcccatcacgtttcagtggcagtggatctgggacagatttcactctcaccatcagcagtctgcaacctgaagattttgctacgtactactgtcaacagtatgctacttggcctctgacgttcggccaagggaccaaggtggaaatcaaacgg

SEQ ID NO: 382 - DNA, 324 bp, Homo sapiens
gacatccagatgacccagtctccatcctccctgtctgcatctgtaggagaccgtgtcaccatcacttgccgggcaagtcagagcatttatctgagtttattgtggtaccagcagaaaccagggaaaacccctaagctcctgatctataatgcatcccggttgcaaagtggggtcccatcacgtttcagtggcagtggatctgggacagatttcactctcaccatcagcagtctgcaacctgaagattttgctacgtactactgtcaacagtcgtgggagtggccttttacgttcggccaagggaccaaggtggaaatcaaacgg

SEQ ID NO: 383 - DNA, 324 bp, Homo sapiens; identical to SEQ ID NO: 377

SEQ ID NO: 384 - DNA, 324 bp, Homo sapiens
gacatccagatgacccagtctccatcctccctgtctgcatctgtaggagaccgtgtcaccatcacttgccgggcaagtcagagcattagcagctatttaaattggtaccagcagaaaccagggaaagcccctaagctcctgatctatggtgcatccattttgcaaagtggggtcccatcacgtttcagtggcagtggatctgggacagatttcactctcaccatcagcagtctgcaacctgaagattttgctacgtactactgtcaacagtgggtttggttgcctattacgttcggccaagggaccaaggtggaaatcaaacgg

SEQ ID NO: 385 - DNA, 324 bp, Homo sapiens
gacatccagatgacccagtctccatcctccctgtctgcatctgtaggagaccgtgtcaccatcacttgccgggcaagtcagagcattcagcagtggttatattggtaccagcagaaaccagggaaagcccctaagctcctgatctataaggcatccattttgcaaagtggggtcccatcacgtttcagtggcagtggatctgggacagatttcactctcaccatcagcagtctgcaacctgaagattttgctacgtactactgtcaacagtatgagcggtatccttttacgttcggccaagggaccaaggtggaaatcaaacgg

SEQ ID NO: 386 - DNA, 324 bp, Homo sapiens
gacatccagatgacccagtctccatcctccctgtctgcatctgtaggagaccgtgtcaccatcacttgccgggcaagtcagagcattactcatgcgttaaagtggtaccagcagaaaccagggaaagcccctaagctcctgatctataaggcatcctttttgcaaagtggggtcccatcacgtttcagtggcagtggatctgggacagatttcactctcaccatcagcagtctgcaacctgaagattttgctacgtactactgtcaacagtctcagcttcttcctatgacgttcggccaagggaccaaggtggaaatcaaacgg

SEQ ID NO: 387 - DNA, 324 bp, Homo sapiens
gacatccagatgacccagtctccatcctccctgtctgcatctgtaggagaccgtgtcaccatcacttgccgggcaagtcagagcatttataattatttaacttggtaccagcagaaaccagggaaagcccctaagctcctgatctatggtgcatccatgttgcaaagtggggtcccatcacgtttcagtggcagtggatctgggacagatttcactctcaccatcagcagtctgcaacctgaagattttgctacgtactactgtcaacaggagaggtctggtccttatacgttcggccaagggaccaaggtggaaatcaaacgg

SEQ ID NO: 388 - DNA, 324 bp, Homo sapiens
gacatccagatgacccagtctccatcctccctgtctgcatctgtaggagaccgtgtcaccatcacttgccgggcaagtcagagcattagcagctatttaaattggtaccagcagaaaccagggaaagcccctaagctcctgatctattttgcatcccgtttgcaaagtggggtcccatcacgtttcagtggcagtggatctgggacagatttcactctcaccatcagcagtctgcaacctgaagattttgctacgtactactgtcaacagaatatgctgttgcctgtgacgttcggccaagggaccaaggtggaaatcaaacgg

SEQ ID NO: 389 - DNA, 324 bp, Homo sapiens
gacatccagatgacccagtctccatcctccctgtctgcatctgtaggagaccgtgtcaccatcacttgccgggcaagtcagagcattaggcattttttatattggtaccagcagaaaccagggaaagcccctaagctcctgatctatcatgcatccgtgttgcaaagtggggtcccatcacgtttcagtggcagtggatctgggacagatttcactctcaccatcagcagtctgcaacctgaagattttgctacgtactactgtcaacagtatggggatttgccttttacgttcggtcaagggaccaaggtggaaatcaaacgg

SEQ ID NO: 390 - DNA, 324 bp, Homo sapiens
gacatccagatgacccagtctccaccctccctgtctgcatctgtaggagaccgtgtcaccatcacttgccgggcaagtcagagcattgggtggtggttatattggtaccagcagaaaccagggaaagcccctaagctcctgatctatcatgcatccaggttgcaaagtggggtcccatcacgtttcagtggcagtggatctgggacagatttcactctcaccatcagcagtctgcaacctgaagattttgctacgtactactgtcaacagtataattctacgccttttacgttcggccaagggaccaaggtggaaatcaaacgg

SEQ ID NO: 391 - DNA, 324 bp, Homo sapiens
gacatccagatgacccagtctccatcctccctgtctgcatctgtaggagaccgtgtcaccatcacttgccgggcaagtcagagcattgataggtttttagcttggtaccagcagaaaccagggaaagcccctaagctcctgatctatcatgcatccgatttgcaaagtggggtcccatcacgtttcagtggcagtggatctgggacagatttcactctcaccatcagcagtctgcaacctgaagattttgctacgtactactgtcaacagtttgatcagtggccttttacgttcggccaagggaccaaggtggaaatcaaacgg

SEQ ID NO: 392 - DNA, 324 bp, Homo sapiens
gacatccagatgacccagtctccatcctccctgtctgcatctgtaggagaccgtgtcaccatcacttgccgggcaagtcagagcattaagagtaggttagcgtggtaccagcagaaaccagggaaagcccctaagctcctgatctataaggcatcccttttgcaaagtggggtcccatcacgtttcagtggcagtggatctgggacagatttcactctcaccatcagcagtctgcaacctgaagattttgctacgtactactgtcaacagtatagtaggaatcctattacgttcggccaagggaccaaggtggaaatcaaacgg

SEQ ID NO: 393 - DNA, 324 bp, Homo sapiens
gacatccagatgacccagtctccatcctccctgtctgcatctgtaggagaccgtgtcaccatcacttgccgggcaagtcagagcattagtcggtctttacattggtaccagcagaaaccagggaaagcccctaagctcctgatctatcgggcatcccgtttgcaaagtggggtcccatcacgtttcagtggcagtggatctgggacagatttcactctcaccatcagcagtctgcaacctgaagattttgctacgtactactgtcaacagaatcggcttaggcctcatacgttcggccaagggaccaaggtggaaatcaaacgg

SEQ ID NO: 394 - DNA, 324 bp, Homo sapiens
gacatccagatgacccagtctccatcctccctgtctgcatctgtaggagaccgtgtcaccatcacttgccgggcaagtcagagcattaagcagtttttatattggtaccagcagaaaccagggaaagcccctaagctcctgatctatcaggcatcctatttgcaaagtggggtcccatcacgtttcagtggcagtggatctgggacagatttcactctcaccatcagcagtctgcaacctgaagattttgctacgtactactgtcaacagtatgaggtttatccttttacgttcggccaagggaccaaggtggaaatcaaacgg

SEQ ID NO: 395 - DNA, 324 bp, Homo sapiens
gacatccagatgacccagtctccatcctccctgtctgcatctgtaggagaccgtgtcaccatcacttgccgggcaagtcagagcatttatcattatttatattggtaccagcagaaaccagggaaagcccctaagctcctgatctatgctgcatcccttttgcaaagtggggtcccatcacgtttcagtggcagtggatctgggacagatttcactctcaccatcagcagtctgcaacctgaagattttgctacgtactactgtcaacagtatcagctttatccttttacgttcggccaagggaccaaggtggaaatcaaacgg

SEQ ID NO: 396 - DNA, 324 bp, Homo sapiens
gacatccagatgacccagtctccatcctccctgtctgcatctgtaggagaccgtgtcaccatcacttgccgggcaagtcagagcattagcagctatttaaattggtaccagcagaaaccagggaaagcccctaagctcctgatctattttgcatcctctttgcaaagtggggtcccatcacgtttcagtggcagtggatctgggacagatttcactctcaccatcagcagtctgcaacctgaagattttgctacgtactactgtcaacagggttgggatgtgccttatacgttcggccaagggaccaaggtggaaatcaaacgg

SEQ ID NO: 397 - DNA, 324 bp, Homo sapiens
gacatccagatgacccagtctccatcctccctgtctgcatctgtaggagaccgtgtcaccatcacttgccgggcaagtcagagcattgataattggttacggtggtaccagcagaaaccagggaaagcccctaagctcctgatctatagtgcatcctttttgcaaagtggggtcccatcacgtttcagtggcagtggatctgggacagatttcactctcaccatcagcagtctgcaacctgaagattttgctacgtactactgtcaacaggggcgttcggcgcctcagacgttcggccaagggaccaaggtggaaatcaaacgg

SEQ ID NO: 398 - DNA, 324 bp, Homo sapiens
gacatccagatgacccagtctccatcctccctgtctgcatctgtaggagaccgtgtcaccatcacttgccgggcaagtcagagcatttggtattggttaagttggtaccagcagaaaccagggaaagcccctaagctcctgatctattatgcatccagtttgcaaagtggggtcccatcacgtttcagtggcagtggatctgggacagatttcactctcaccatcagcagtctgcaacctgaagattttgctacgtactactgtcagcagatgtcgagtactccttttacgttcggccaagggaccaaggtggaaatcaaacgg

SEQ ID NO: 399 - DNA, 324 bp, Homo sapiens
gacatccagatgacccagtctccatcctccctgtctgcatctgtaggagaccgtgtcaccatcacttgccgggcaagtcagagcattacgatgaggttagggtggtaccagcagaaaccagggaaagcccctaagctcctgatctataatgcatcccatttgcaaagtggggtcccatcacgtttcagtggcagtggatctgggacagatttcactctcaccatcagcagtctgcaacctgaagattttgctacgtactactgtcaacagtattttgattatcctacgacgttcggccaagggaccaaggtggaaatcaaacgg

SEQ ID NO: 400 - DNA, 324 bp, Homo sapiens
gacatccagatgacccagtctccatcctccctgtctgcatctgtaggagaccgtgtcaccatcacttgccgggcaagtcagagcattcattggctgttatcgtggtaccagcagaaaccagggaaagcccctaagctcctgatctatgctgcatccagtttgcaaagtggggtcccatcacgtttcagtggcagtggatctgggacagatttcactctcaccatcagcagtctgcaacctgaagattttgctacgtactactgtcaacagaatttggctaggccttttacgttcggccaagggaccaaggtggaaatcaaacgg

SEQ ID NO: 401 - DNA, 348 bp, Homo sapiens
gaggtgcagctgttggagtctgggggaggcttggtacagcctggggggtccctgcgtctctcctgtgcagcctccggattcacctttagcagctatgccatgagctgggtccgccaggttccagggaagggtctagagtgggtctcatctatttcttttcatggtacgcctacagggtacgcagactccgtgaagggccggttcaccatctcccgcgacaattccaagaacacgctgtatctgcaaatgaacagcctgcgtgccgaggacaccgcggtatattactgtgcgaaagggatgttttattttgactactggggccagggaaccctggtcaccgtctcgagc

SEQ ID NO: 402 - DNA, 348 bp, Homo sapiens
gaggtgcagctgttggagtctgggggaggcttggtacagcctggggggtccctgcgtctctcctgtgcagcctccggattcacctttaatgggtatgatatgttttgggtccgccaggctccagggaagggtctagagtgggtctcatctatttcggattcgggttctgtgacacggtacgcagactccgtgaagggccggttcaccatctcccgcgacaattccaagaacacgctgtatctgcaaatgaacagcctgcgtgccgaggacaccgcggtatattactgtgcgaaatcttgggatgagtttgactactggggccagggaaccctggtcaccgtctcgagc

SEQ ID NO: 403 - DNA, 348 bp, Homo sapiens
gaggtgcagctgttggagtctgggggaggcttggtacagcctggggggtccctgcgtctctcctgtgcagcctccggattcacctttggttcgtataagatgggttgggtccgccaggctccagggaagggtctagagtgggtctcatcgattactaaggatggttctaagacagcttacgcagactccgtgaagggccggttcaccatctcccgcgacaattccaagaacacgctgtatctgcaaatgaacagcctgcgtgccgaggacaccgcggtatattactgtgcgaaatttcggccgaagtttgaatactggggccagggaaccctggtcaccgtctcgagc

SEQ ID NO: 404 - DNA, 348 bp, Homo sapiens
gaggtgcagctgttggagtctgggggaggcttggtacagcctggggggtccctgcgtctctcctgtgcagcctccggattcacctttagcagctatgccatgagctgggtccgccaggctccagggaagggtctagagtgggtctcagctattagtggtagtggtggtagcacatactacgcagactccgtgaagggccggttcaccatctcccgcgacaattccaagaacacgctgtatctgcaaatgaacagcctgcgtgccgaggacaccgcggtatattactgtgcgaaagggcgttttagttttgactactggggccagggaaccctggtcaccgtctcgagc

SEQ ID NO: 405 - DNA, 348 bp, Homo sapiens
gaggtgcagctgttggagtctgggggaggcttggtacagcctggggggtccctgcgtctctcctgtgcagcctccggattcacctttaggaattatgatatgaattgggtccgccaggctccagggaagggtctagagtgggtctcagctattagtggtagtggtggtagcacatactacgcagactccgtgaagggccggttcaccatctcccgcgacaattccaagaacacgctgtatctgcaaatgaacagcctgcgtgccgaggacaccgcggtatattactgtgcgaaaggtttgcatacgtttgactactggggccagggaaccctggtcaccgtctcgagc

SEQ ID NO: 406 - DNA, 348 bp, Homo sapiens
gaggtgcagctgttggagtctgggggaggcttggtacagcctggggggtccctgcgtctctcctgtgcagcctccggattcacctttgggttgtattggatgagttgggtccgccaggctccagggaagggtctagagtgggtctcaacgattgatcagctgggtgtttctacattttacgcagactccgtgaagggccggttcaccatctcccgcgacaattccaagaacacgctgtatctgcaaatgaacagcctgcgtgccgaggacaccgcggtatattactgtgcgaaagggtatgtttattttgactactggggccagggaaccctggtcaccgtctcgagc

SEQ ID NO: 407 - DNA, 348 bp, Homo sapiens
gaggtgcagctgttggagtctgggggaggcttggtacagcctggggggtccctgcgtctctcctgtgcagcctccggattcacctttcctctgtatgcgatgacttgggtccgccaggctccagggaagggtctagagtgggtctcagctattagtggtagtggtggtagcacatactacgcagactccgtgaagggccggttcaccatctcccgcgacaattccaagaacacgctgtatctgcaaatgaacagcctgcgtgccgaggacaccgcggtatattactgtgcgaaagggtcgaggtattttgactactggggccagggaaccctggtcaccgtctcgagc

SEQ ID NO: 408 - DNA, 348 bp, Homo sapiens
gaggtgcagctgttggagtctgggggaggcttggtacagcctggggggtccctgcgtctctcctgtgcagcctccggattcaccttttataagtatttgatgtggtgggtccgccaggctccagggaagggtctagagtgggtctcagctattagtggtagtggtggtagcacatactacgcggactccgtgaagggccggttcaccatctcccgcgacaattccaagaacacgctgtatctgcaaatgaacagcctgcgtgccgaggacaccgcggtatattactgtgcgaaagagggtttggggtttgactactggggccagggaaccctggtcaccgtctcgagc

SEQ ID NO: 409 - DNA, 360 bp, Homo sapiens
gaggtgcagctgttggagtctgggggaggcttggtacagcctggggggtccctgcgtctctcctgtgcagcctccggattcacctttcgtaagtataagatgggttgggtccgccaggctccagggaagggtctagagtgggtctcagctattagtggtagtggtggtagcacatactacgcagactccgtgaagggccggttcaccatctcccgcgacaattccaagaacacgctgtatctgcaaatgaacagcctgcgtgccgaggacaccgcggtatattactgtgcgaaatatcatttgcagtggggtcataattttgactactggggccagggaaccctggtcaccgtctcgagc

SEQ ID NO: 410 - DNA, 360 bp, Homo sapiens
gaggtgcagctgttggagtctgggggaggcttggtacagcctggggggtccctgcgtctctcctgtgcagcctccggattcacctttagcagctatgccatgagctgggtccgccaggctccagggaagggtctagagtgggtctcagctattagtggtagtggtggtagcacatactacgcagactccgtgaagggccggttcaccatctcccgcgacaattccaagaacacgctgtatctgcaaatgaacagcctgcgtgccgaggacaccgcggtatattactgtgcgaaatatcagacgcgggtgggtgatggttttgactactggggccagggaaccctggtcaccgtctcgagc

SEQ ID NO: 411 - DNA, 360 bp, Homo sapiens
gaggtgcagctgttggagtctgggggaggcttggtacagcctggggggtccctgcgtctctcctgtgcagcctccggattcacctttagcagctatgccatgagctgggtccgccaggctccagggaagggtctagagtgggtctcagctattagtggtagtggtggtagcacatactacgcagactccgtgaagggccggttcaccatctcccgcgacaattccaagaacacgctgtatctgcaaatgaacagcctgcgtgccgaggacaccgcggtatattactgtgcgaaagcgatgtctatggcgggttcggcttttgactactggggccagggaaccctggtcaccgtctcgagc

SEQ ID NO: 412 - DNA, 360 bp, Homo sapiens
gaggtgcagctgttggagtctgggggaggcttggtacagcctggggggtccctgcgtctctcctgtgcagcctccggattcacctttagcagctatgccatgagctgggtccgccaggctccagggaagggtctagagtgggtctcagctattagtggtagtggtggtagcacatactacgcagactccgtgaagggccggttcaccatctcccgcgacaattccaagaacacgctgtatctgcaaatgaacagcctgcgtgccgaggacaccgcggtatattactgtgcgacacagcctagggcgctggctggttattttgactactggggccaggggaccctggtcaccgtctcgagc

SEQ ID NO: 413 - DNA, 360 bp, Homo sapiens
gaggtgcagctgttggagtctgggggaggcttggtacagcctggggggtccctgcgtctctcctgtgcagcctccggattcacctttagcagctatgccatgagctgggtccgccaggctccagggaagggtctagagtgggtctcagctattagtggtagtggtggtagcacatactacgcagactccgtgaagggccggttcaccatctcccgcgacaattccaagaacacgctgtatctgcaaatgaacagcctgcgtgccgaggacaccgcggtatattactgtgcgaaaacgctttcgggttctgatatggcgtttgactactggggccagggaaccctggtcaccgtctcgagc

SEQ ID NO: 414 - DNA, 360 bp, Homo sapiens
gaggtgcagctgttggagtctgggggaggcttggtacagcctggggggtccctgcgtctctcctgtgcagcctccggattcacctttagcagctatgccatgagctgggtccgccaggctccagggaagggtctagagtgggtctcagctattagtggtagtggtggtagcacatactacgcagactccgtgaagggccggttcaccatctcccgcgacaattccaagaacacgctgtatctgcaaatgaacagcctgcgtgccgaggacaccgcggtatattactgtgcgaaaggtatgactgttgggcattttcagtttgactactggggccagggaaccctggtcaccgtctcgagc

SEQ ID NO: 415 - DNA, 360 bp, Homo sapiens
gaggtgcagctgttggagtctgggggaggcttggtacagcctggggggtccctgcgtctctcctgtgcagcctccggattcacctttagcagctatgccatgagctgggtccgccaggctccagggaagggtctagagtgggtctcagctattagtggtagtggtggtagcacatactacgcagactccgtgaagggccggttcaccatctcccgcgacaattccaagaacacgctgtatctgcaaatgaacagcctgcgtgccgaggacaccgcggtatattactgtgcgaaagcgtttgcgcatgtgatggggggttttgactactggggccagggaaccctggtcaccgtctcgagc

SEQ ID NO: 416 - DNA, 360 bp, Homo sapiens
gaggtgcagctgttggagtctgggggaggcttggtacagcctggggggtccctgcgtctctcctgtgcagcctccggattcacctttagcagctatgccatgagctgggtccgccaggctccagggaagggtctagagtgggtctcagctattagtggtagtggtggtagcacatactacgcagactccgtgaagggccggttcaccatctcccgcgacaattccaagaacacgctgtatctgcaaatgaacagcctgcgtgccgaggacaccgcggtatattactgtgcgaaagctatgagtcataagtttcaggggtttgactactggggccagggaaccctggtcaccgtctcgagc

SEQ ID NO: 417 - DNA, 354 bp, Homo sapiens
gaggtgcagctgttggagtctgggggaggcttggtacagcctggggggtccctgcgtctctcctgtgcagcctccggattcacctttggtggttatgctatggcttgggtccgccaggctccagggaagggtctagagtgggtctcaaggatttcgccgtcgggtgggggtacatactacgcagactccgtgaagggccggttcaccatctcccgcgacaattccaagaacacgctgtatctgcaaatgaacagcctgcgtgccgaggacaccgcggtatattactgtgcgaaaatgattcaggggcttaggtttgactactggggtcagggaaccctggtcaccgtctcgagc

SEQ ID NO: 418 - DNA, 354 bp, Homo sapiens
gaggtgcagctgttggagtctgggggaggcttggtacagcctggggggtccctgcgtctctcctgtgcagcctccggattcacctttgcggcttattcgatgtcgtgggtccgccaggctccagggaagggtctagagtgggtctcaagtattgctcctgatggtactcatacatactacgcagactccgtgaagggccggttcaccatctcccgcgacaattccaagaacacgctgtatctgcaaatgaacagcctgcgtgccgaggacaccgcggtatattactgtgcgaaatggcttgagcttcctatttttgactactggggtcagggaaccctggtcaccgtctcgagc

SEQ ID NO: 419 - DNA, 363 bp, Homo sapiens
gaggtgcagctgttggagtctgggggaggcttggtacagcctggggggtccctgcgtctctcctgtgcagcctccggattcacctttccttattatcatatggcgtgggtccgccaggctccagggaagggtctagagtgggtctcatcgattacgccttcgggtggtcagacatactacgcagactccgtgaagggccggttcaccatctcccgcgacaattccaagaacacgctgtatctgcaaatgaacagcctgcgtgccgaggacaccgcggtatattactgtgcgaaaattcatcgtgcgggggctgctagtaattttgactactggggtcagggaaccctggtcaccgtctcgagc

SEQ ID NO: 420 - DNA, 372 bp, Homo sapiens
gaggtgcagctgttggagtctgggggaggcttggtacagcctggggggtccctgcgtctctcctgtgcagcctccggattcacctttggtgcgtatgagatgaattgggtccgccaggctccagggaagggtctagagtgggtctcaacgattgatagtaagggttttaagacatactacgcagactccgtgaagggccggttcaccatctcccgcgacaattccaagaacacgctgtatctgcaaatgaacagcctgcgtgccgaggacaccgcggtatattactgtgcgaaatcttcggtgacgtctcttttggcgtatagtaggcattttgactactggggtcagggaaccctggtcaccgtctcgagc

SEQ ID NO: 421 - DNA, 369 bp, Homo sapiens
gaggtgcagctgttggagtctgggggaggcttggtacagcctggggggtccctgcgtctctcctgtgcagcctccggattcaccttttcgaattatgatatggcttgggtccgccaggctccagggaagggtctagagtgggtctcaagtatttcggatatgggtagggctacatactacgcagactccgtgaagggccggttcaccatctcccgcgacaattccaagaacacgctgtatctgcaaatgaacagcctgcgtgccgaggacaccgcggtatattactgtgcgaaaacttttgctactaatgggatgctttctggggcttttgactactggggtcagggaaccctggtcaccgtctcgagc

SEQ ID NO: 422 - DNA, 369 bp, Homo sapiens
gaggtgcagctgttggagtctgggggaggcttggtacagcctggggggtccctgcgtctctcctgtgcaggctccggattcacctttcgggattatccgatgagttgggtccgccaggctccagggaagggtctagagtgggtctcaacgatttattcttggggttctaagacatactacgcagactccgtgaagggccggttcaccatctcccgcgacaattccaagaacacgctgtatctgcaaatgaacagcctgcgtgccgaggataccgcggtatattactgtgcgaaaatggcgcaggcggagacttcgcctaataattattttgactactggggtcagggaaccctggtcaccgtctcgagc

SEQ ID NO: 423 - DNA, 369 bp, Homo sapiens
gaggtgcagctgttggagtctgggggaggcttggtacagcctggggggtccctgcgtctctcctgtgcagcctccggattcacctttgatgattataagatgagttgggtccgccaggctccagggaagggtctagagtgggtctcatcgattaatggttctgggcagggtacatactacgcagactccgtgaagggccggttcaccatctcccgcgacaattccaagaacacgctgtatctgcaaatgaacagcctgcgtgccgaggacaccgcggtatattactgtgcgaaatctctggctttggcgtctactcggcatactggttttgactactggggtcagggaaccctggtcaccgtctcgagc

SEQ ID NO: 424 - DNA, 324 bp, Homo sapiens
gacatccagatgacccagtctccatcctccctgtctgcatctgtaggagaccgtgtcaccatcacttgccgggcaagtcagtctattggggagaggttatggtggtaccagcagaaaccagggaaagcccctaagctcctgatctataatagttccgtgttgcaaagtggggtcccatcacgtttcagtggcagtggatctgggacagatttcactctcaccatcagcagtctgcaacctgaagattttgctacgtactactgtcaacagagttggagggggcctgctacgttcggccaagggaccaaggtggaaatcaaacgg

SEQ ID NO: 425 - DNA, 324 bp, Homo sapiens
gacatccagatgacccagtctccatcctccctgtctgcatctgtaggagaccgtgtcaccatcacttgccgggcaagtcaggatattgatcgggctttacagtggtaccagcagaaaccagggaaagcccctaagctcctgatctatatgagttccgttttgcaaagtggggtcccatcacgtttcagtggcagtggatctgggacagatttcactctcaccatcagcagtctgcaacctgaagattttgctacgtactactgtcaacagcaggctgggtatccttttacgttcggccaagggaccaaggtggaaatcaaacgg

SEQ ID NO: 426 - DNA, 324 bp, Homo sapiens
gacatccagatgacccagtctccatcctccctgtctgcatctgtaggagaccgtgtcaccatcacttgccgggcaagtcagaatattgatcgtgagttacgttggtaccagcagaaaccagggaaagcccctatgctcctgatctatcatgcgtccaggttgcaaagtggggtcccatcacgtttcagtggcagtggatctgggacagatttcactctcactatcagcagtctgcaacctgaagattttgctacgtactactgtcaacagtattttacttggcctcttacgttcggccaagggaccaaggtggaaatcaaacgg

SEQ ID NO: 427 - DNA, 324 bp, Homo sapiens
gacatccagatgacccagtctccatcctccctgtctgcatctgtaggagaccgtgtcaccatcacttgccgggcaagtcagagtattagtacttcgttacagtggtaccagcagaaaccagggaaagcccctaagctcctgatctattctagttccacgttgcaaagtggggtcccatcacgtttcagtggcagtggatctgggacagatttcactctcaccatcagcagtctgcaacctgaagattttgctacgtactactgtcaacagcagtgggagtatccttttacgttcggccaagggaccaaggtggaaatcaaacgg

SEQ ID NO: 428 - DNA, 324 bp, Homo sapiens
gacatccagatgacccagtctccatcctccctgtctgcatctgtaggagaccgtgtcaccatcacttgccgggcaagtcagaatattggtacggcgttatcttggtatcagcagaaaccagggaaagcccctaagctcctgatctattgggcttccattttgcaaagtggggtcccatcacgtttcagtggcagtggatctgggacagatttcactctcaccatcagcagtctgcaacctgaagattttgctacgtactactgtcaacagactaattcttggccttttacgtttggccaagggaccaaggtggaaatcaaacgg

SEQ ID NO: 429 - DNA, 324 bp, Homo sapiens
gacatccagatgacccagtctccatcctccctgtctgcatctgtaggagaccgtgtcaccatcacttgccgggcaagtcagaagattgatgatgcgttacagtggtatcagcagaaaccagggaaagcccctaagctcctgatctatttggcgtcccatttgcaaagtggggtcccatcacgtttcagtggcagtggatctgggacagatttcactctcaccatcagcagtttgcaacctgaagattttgctacgtactactgtcaacagcagagtaattggccttttacgttcggccaagggaccaaggtggaaatcaaacgg

SEQ ID NO: 430 - DNA, 324 bp, Homo sapiens
gacatccggatgacccagtctccatcctccctgtctgcatctgtaggagaccgtgtcaccatcacttgccgggcaagtcagagtattgggcgggcgttacagtggtatcagcagaaaccagggaaagcccctaagctcctgatctatcagcgttccatgttgcaaagtggggtcccatcacgtttcagtggcagtggatctgggacagatttcactctcaccatcagcagtctgcaacctgaagattttgctacgtactactgtcaacagagttatctgtggccttttacgttcggccaagggaccaaggtggaaatcaaacgg

SEQ ID NO: 431 - DNA, 324 bp, Homo sapiens
gacatccagatgacccagtctccatcctccctgtctgcatctgtaggagaccgtgtcaccatcacttgccgggcaagtcaggagattgggaaggagttattgtggtatcagcagaaaccagggaaagcccctaagctcctgatctatgatgtttccgttttgcaaagtggggtcccatcacgtttcagtggcagtggatctgggacagatttcactctcaccatcagcagtctgcaacctgaagattttgctacgtactactgtcaacagtatcagtcttatcctaatacgttcggccaagggaccaaggtggaaatcaaacgg

SEQ ID NO: 432 - DNA, 324 bp, Homo sapiens
gacatccagatgacccagtctccatcctccctgtctgcatctgtaggagaccgtgtcaccatcacttgccgggcaagtcagcagattatgaggagtttaaattggtatcagcagaaaccagggaaagcccctaagctcctgatctatcagagttccattttgcaaagtggggtcccatcacgtttcagtggcagtggatctgggacagatttcactctcaccatcagcagtctgcaacctgaagattttgctacgtactactgtcaacaggcgtggcagtatccttttacgttcggccaagggaccaaggtggaaatcaaacgg

SEQ ID NO: 433 - DNA, 324 bp, Homo sapiens
gacatccagatgacccagtctccatcctccctgtctgcatctgtaggagaccgtgtcaccatcacttgccgggcaagtcaggatattcagcggcgtttagcttggtatcagcagaaaccagggaaagcccctaagctcctgatctataatgtgtcctatttgcaaagtggggtcccatcacgtttcagtggcagtggatctgggacagatttcactctcaccatcagcagtctgcaacctgaagattttgctacgtactactgtcaacagtataatgattatcctacgacgttcggccaagggaccaaggtggaaatcaaacgg

SEQ ID NO: 434 - DNA, 348 bp, Homo sapiens
gaggtgcagctgttggagtctgggggaggcttggtacagcctggggggtccctgcgtctctcctgtgcagcctccggattcacctttaggatgtatcagatgtattgggtccgccaggctccagggaagggtctagagtgggtctcaagtattagtgcgtctggtgcgggtacatactacgcagactccgtgaagggccggttcaccatctcccgcgacaattccaagaacacgctgtatctgcaaatgaacagcctgcgtgccgaggacaccgcggtatattactgtgcgaaagctgctagtagttttgactactggggtcagggaaccctggtcaccgtctcgagc

SEQ ID NO: 435 - DNA, 351 bp, Homo sapiens
gaggtgcagctgttggagtctgggggaggcttggtacagcctggggggtccctgcgtctctcctgtgcagcctccggattcaccttcgctagttatcagatgtattgggtccgccaggctccagggaagggtctagagtgggtctcaactattagtccttctggtggggggacatactacgcagactccgtgaagggccggttcaccatctcccgcgacaattccaagaacacgctgtatctgcaaatgaacagcctgcgtgccgaggacaccgcggtatattactgtgcgaaaaaggatactggtacgtttgactactggggtcagggaaccctggtcaccgtctcgagc

SEQ ID NO: 436 - DNA, 348 bp, Homo sapiens
gaggtgcagctgttggagtctgggggaggtttggtacagcctggggggtccctgcgtctctcctgtgcagcctccggattcacctttaataagtattctatggggtgggtccgccaggctccagggaagggtctagagtgggtctcacgtatttcttcttcgggtggtggtacatactacgcagactccgtgaagggccggttcaccatctcccgcgacaattccaagaacacgctgtatctgcaaatgaacagcctgcgtgccgaggacaccgcggtatattactgtgcgaaagttgctaatccgtttgactactggggtcagggaaccctggtcaccgtctcgagc

SEQ ID NO: 437 - DNA, 372 bp, Homo sapiens
gaggtgcagctgttggagtctgggggaggcttggtacagcctggggggtccctgcgtctctcctgtgcagcctccggattcacctttaataagtattctatggggtgggtccgccaggctccagggaagggtctagagtgggtctcacgtatttcttcttcgggtggtggtacatactacgcagactccgtgaagggccggttcaccatctcccgcgacaattccaagaacacgctgtatctgcaaatgaacagcctgcgtgccgaggacaccgcggtatattactgtgcgaaagagcctgataggtctgggtatcttactagggtggcgtttgactactggggtcagggaaccctggtcaccgtctcgagc

SEQ ID NO: 438 - DNA, 369 bp, Homo sapiens
gaggtgcagctgttggagtctgggggaggcttggtacagcctggggggtccctgcgtctctcctgtgcagcctccggattcacctttgagacttatcagatgtggtgggtccgccaggctccagggaagggtctagagtgggtctcaagtatttctccgagtggttctggtacatactacgcagactccgtgaagggccggttcaccatctcccgcgacaattccaagaacacgctgtatctgcaaatgaacagcctgcgtgccgaggacaccgcggtttattactgtgcgaaaatgtgtcctcgttgtagggatgtggttagtctttttgactactggggtcagggaaccctggtcaccgtctcgagc

SEQ ID NO: 439 - DNA, 363 bp, Homo sapiens
gaggtgcagctgttggagtctgggggaggcttggtacagcctggggggtccctgcgtctctcctgtgcagcctccggattcaccttttcggagtatggtatgtggtgggtccgccaggctccagggaagggtctagagtgggtctcaggtattactgctactggtaagatgacatactacgcagactccgtgaagggccggttcaccatctcccgcgacaattccaagaacacgctgtatctgcaaatgaacagcctgcgtgccgaggacaccgcggtatattactgtgcgaaatcgagtcttccttcgggtcagggtcattttgactactggggtcagggaaccctggtcaccgtctcgagc

SEQ ID NO: 440 - DNA, 366 bp, Homo sapiens
gaggtgcagctgttggagtctgggggaggcttggtacagcctggggggtccctgcgtctctcctgtgcagcctccggattcacctttcgtgagtatcagatgtcttgggcccgccaggctccagggaagggtctagagtgggtctcaacgattagtgcttcgggtagtgggacatactacgcagactccgtgaagggccggttcaccatctcccgcgacaattccaagaacacgctgtatctgcaaatgaacagcctgcgtgccgaggataccgcggtatattactgtgcgaaacggtttaagatttctccggtttttagtagttttgactactggggtcagggaaccctggtcaccgtctcgagc

SEQ ID NO: 441 - DNA, 366 bp, Homo sapiens
gaggtgcagctgttggagtctgggggaggcttggtacagcctggggggtccctgcgtctctcctgtgcagcctccggattcacctttgcggagtatcagatgtattgggtccgccaggctccagggaagggtctagagtgggtctcatctatttctgtgtctggtgctggtacatactacgcagactccgtgaagggccggttcaccatctcccgcgacaattccaagaacacgctgtatctgcaaatgaacagcctgcgtgccgaggacaccgcggtatattactgtgcgaaatcgcggaatacgctgacggattcgcatcgttttgactactggggtcagggaaccctggtcaccgtctcgagc

SEQ ID NO: 442 - DNA, 372 bp, Homo sapiens
gaggtgcagctgttggagtctgggggaggcttggtacagcctggggggtccctgcgtctctcctgtgcagcctccggattcacctttacgaggtatcagatggcgtgggtccgccaggctccagggaagggtctagagtgggtctcatctatttcgagtagtggtgcgggtacatactacgcagactccgtgaagggccggttcaccatctcccgcgacaattccaagaacacgctgtatctgcaaatgaacagcctgcgtgccgaggacaccgcggtatattactgtgcgaaatgggcggctaatttttcgggtaattataggcctaagtttgactactggggtcagggaaccctggtcaccgtctcgagc

SEQ ID NO: 443 - DNA, 366 bp, Homo sapiens
gaggtgcagctgttggagtctgggggaggcttggtacagcctggggggtccctgcgtctctcctgtgcagcctccggattcacctttaaggattatacgatgacgtgggtccgccaggctccagggaagggtctggagtgggtctcaaggatttcgtcgtcgggtgcgggtacatactacgcagactccgtgaagggccggttcaccatctcccgcgacaattccaagaacacgctgtatctgcaaatgaacagcctgcgtgccgaggataccgcggtatattactgtgcgaaagttgggaattctagtagggtgtctcatacttttgactactggggtcagggaaccctggtcaccgtctcgagc

SEQ ID NO: 444 - DNA, 366 bp, Homo sapiens
gaggtgcagctgttggagtctgggggaggcttggtacagcctggggggtccctgcgtctctcctgtgcagcctccggattcacctttgcgcagtattctatggggtgggtccgccaggctccagggaagggtctggagtgggtctcaaggatttcgagttcgggtagtggtacatactacgcagactccgtgaagggccggttcaccatctcccgcgacaattccaagaacacgctgtatctgcaaatgaacagcctgcgtgccgaggacaccgcggtatattactgtgcgaaagagggtaggcctcttacggcttctttgcgttttgactactggggtcagggaaccctggtcaccgtctcgagc

SEQ ID NO: 445 - DNA, 357 bp, Homo sapiens
gaggtgcagctgttggagtctgggggaggcttggtacggcctggggggtccctgcgtctctcctgtgcagcctccggattcacctttaggatgtatcagatgtattgggtccgccaggctccagggaagggtctagagtgggtctcaagtattagtgcgtctggtgcgggtacatactacgcagactccgtgaagggccggttcaccatctcccgcgacaattccaagaacacgctgtatctgcaaatgaacagcctgcgtgccgaggacaccgcggtatattactgtgcgaaaggtatgatgccgctgagttcttttgactactggggtcagggaaccctggtcaccgtctcgagc

SEQ ID NO: 446 - DNA, 357 bp, Homo sapiens
gaggtgcagctgttggagtctgggggaggcttggtacagcctggggggtccctgcgtctctcctgtgcagcctccggattcacctttgggaagtattctatgtcgtgggtccgccaggctccagggaagggtctagagtgggtctcaagtattctggattcgggtgtttttacatactacgcagactccgtgaagggccggttcaccatctcccgcgacaattccaagaacacgctgtacctgcaaatgaacagcctgcgtgccgaggacaccgcggtatattactgtgcgaaaaatgtttcgactccggaggggtttgactactggggtcagggaaccctggtcaccgtctcgagc

SEQ ID NO: 447 - DNA, 360 bp, Homo sapiens
gaggtgcagctgttggagtctgggggaggcttggtacagcctggggggtccctgcgtctctcctgtgcagcctccggattcacctttgagacttatgcgatgagttgggtccgccaggctccagggaagggtctagagtgggtctcatcgattggtatgcatggtaggcctacatactacgcagactccgtgaagggccggttcaccatctcccgcgacaattccaagaacacgctgtatctgcaaatgaacagcctgcgtgccgaggacaccgcggtatattactgtgcgaaacagaagacttctcagtcgggggcgtttgactactggggtcagggaaccctggtcaccgtctcgagc

SEQ ID NO: 448 - DNA, 357 bp, Homo sapiens
gaggtgcagctgttggagtctgggggaggcttggtacagcctggggggtccctgcgtctctcctgtgcagcctccggattcacctttagttcgtatacgatggagtgggtccgccaggctccagggaagggtctagagtgggtctcaaggatttcgtcgtcgggtgcgggtacatactacgcagactccgtgaagggccggttcaccatctcccgcgacaattccaggaacacgctgtatctgcaaatgaacagcctgcgtgccgaggacaccgcggtatattactgtgcgaaaaggacttctttggctgatgtgtttgactactggggtcagggaaccctggtcaccgtctcgagc

SEQ ID NO: 449 - DNA, 366 bp, Homo sapiens
gaggtgcagctgttggagtctgggggaggcttggtacagcctggggggtccctgcgtctctcctgtgcagcctccggattcacctttcgtgcgtatgcgatggcttgggtccgccaggctccagggaagggtctagagtgggtctcaacgatttctggtactggtgatcatacatactacgcagactccgtgaagggccggttcaccatctcccgcgacaattccaagaacacgctgtatctgcaaatgaacagcctgcgtgccgaggacaccgcggtatattactgtgcgaaagctcatggtaatccggtttcggatctttcttttgactactggggtcagggaaccctggtcaccgtctcgagc

SEQ ID NO: 450 - DNA, 360 bp, Homo sapiens
gaggtgcagctgttggagtctgggggaggcttggtacagcctggggggtccctgcgtctctcctgtgcagcctccggattcacctttcgtaggtatgatatgtcgtgggtccgccaggctccagggaagggtctagagtgggtctcaacgatttctagtacgggtcggactacatactacgcagactccgtgaagggccggttcaccatctcccgcgacaattccaagaacacgctgtatctgcaaatgaacagcctgcgtgccgaggacaccgcggtatattactgtgcgaaagcgcttgagactgtttctggggcgtttgactactggggtcagggaaccctggtcaccgtctcgagc

SEQ ID NO: 451 - DNA, 324 bp, Homo sapiens
gacatccagatgacccagtctccatcctccctgtctgcatctgtaggagaccgtgtcaccatcacttgccgggctagtcagaatattggttatagtttagattggtaccagcagaaaccagggaaagcccctaggctcctgatctattttggttcccggttgcaaagtggggtcccatcacgtttcagtggcagtggatctgggacagatttcactctcaccatcagcagtctgcaacctgaagattttgctacgtactactgtcaacagctgctgaagccgccttttacgttcggccaagggaccaaggtggaaatcaaacgg

SEQ ID NO: 452 - DNA, 324 bp, Homo sapiens
gacatccagatgacccagtctccatcctccctgtctgcatctgtaggagaccgtgtcaccatcacttgccgggcaagtcagaggattgggcctagtttattgtggtatcagcagaaaccagggaaagcccctaagctcctgatctataatacttccgtgttgcaaagtggggtcccatcacgtttcaggggcagtggatctgggacagatttcactctcaccatcagcagtctgcaacctgaagattttgctacgtactactgtcaacagacttggaattatccttttacgttcggccaagggaccaaggtggaaatcaaacgg

SEQ ID NO: 453 - DNA, 324 bp, Homo sapiens
gacatccagatgacccagtctccatcctccctgtctgcatctgtaggagaccgtgtcaccatcacttgccgggcaagtcagaatattgagtctggtttatggtggtatcagcagaaaccagggaaagcccctaagctcctgatctataattcgtcctttttgcaaagtggggtcccatcacgtttcagtggcagtggatctgggacagatttcactctcaccatcagcagtctgcaacctgaagattttgctacgtactactgtcaacagccgtggcagagtcctacgacgttcggccaagggaccaaggtggaaatcaaacgg

SEQ ID NO: 454 - DNA, 324 bp, Homo sapiens
gacatccagatgacccagtctccatcctccctgtctgcatctgtaggagaccgtgtcaccatcacttgccgggcaagtcagaatattggtcagaatttatggtggtaccagcagaaaccagggaaagcccctaagctcctgatctatgggtcgtccaagttgcaaagtggggtcccaccacgtttcagtggcagtggatctgggacagatttcactctcaccatcagcagtctgcaacctgaagattttgctacgtactactgtcaaccggcttggcaggggcctaagacgttcggccaagggaccaaggtggagatcaaacgg

SEQ ID NO: 455 - DNA, 324 bp, Homo sapiens
gacatccagatgacccagtctccatcctccctgtctgcatctgtaggagaccgtgtcaccatcacttgccgggcaagtcagtggatttcgcatcgtttaatgtggtatcagcagaaaccagggaaggcccctaagctcctgatctatagggcgtccgagttgcaaagtggggtcccatcacgtttcagtggcagtggatctgggacagatttcactctcaccatcagcagtctgcaacctgaagattttgctacgtactactgtcaacagaatgcgaggatgcctcatacgttcggccaagggaccaaggtggaaatcaaacgg

SEQ ID NO: 456 - DNA, 324 bp, Homo sapiens
gacatccagatgacccagtctccatcctccctgtctgcatctgtaggagaccgtgtcaccatcacttgccgggcaagtcagagtattgatactggtttagattggtatcagcagaaaccagggaaagcccctaagctcctgatctatagggtctccacgttgcaaagtggggtcccatcacgtttcagtggcagtggatctgggacagatttcactctcaccatcagcagtctgcaacctgaagattttgctacgtactactgtcaacagcttcgtcgtccgccttttacgttcggccaagggaccaaggtggaaatcaaacgg

SEQ ID NO: 457 - DNA, 324 bp, Homo sapiens
gacatccagatgacccagtctccatcctccctgtctgcatctgtaggagaccgtgtcaccatcacttgccgggcaagtcagaatattgggtctgcgttacaatggtatcagcagaaaccagggaaagcccctaagctcctgatctatcagatttccaagttgcaaagtggggtcccatcacgtttcagtggcagtggatctgggacagatttcactctcaccatcagcagtctgcaacctgaagattttgctacgtactactgtcaacagaatgagagttggccttttacgttcggccaagggaccaaggtggaaatcaaacgg

SEQ ID NO: 458 - DNA, 324 bp, Homo sapiens
gacatccagatgacccagtctccatcctccctgtctgcatctgtaggagaccgtgtcaccatcacttgccgggcaaatcagaggattgagagttctttaaattggtaccagcagaaaccagggaaagcccctaagctcctgatctatttgtcgtccattttgcaaagtggggtcccatcacgtttcagtggcagtggatctgggacagatttcactctcaccatcagcagtctgcaacctgaagattttgctacgtactactgtcaacagcagtggacttatccttttacgttcggccaagggaccaaggtggaaatcaaacgg

SEQ ID NO: 459 - DNA, 324 bp, Homo sapiens
gacatccagatgacccagtctccatcctccctgtcagcatctgtaggagaccgtgtcaccatcacttgccgggcaagtcagaatattggtaagtctttagattggtatcagcagaaaccagggaaagcccctaagctcctgatctatttgacttccatgttgcaaagtggggtcccatcacgtttcagtggcagtggatctgggacagatttcactctcaccatcagcagtctgcaacctgaagattttgctacgtactactgtcaacagttgcagcgtcctccttttacgttcggccaagggaccaaggtggaaatcaaacgg

SEQ ID NO: 460 - DNA, 324 bp, Homo sapiens
gacatccagatgacccagtctccatcctccctgtctgcatctgtaggagaccgtgtcaccatcacttgccgggcaagtcagtctattggtaagtggttatattggtatcagcagaaaccagggaaagcccctaagctcctgatctatgagtcgtccctgttgcaaagtggggtcccatcacgtttcagtggcagtggatctgggacagatttcactctcaccatcagcagtctgcaacctgaagattttgctacgtactactgtcaacagtatgacatttatccttttacgttcggccaagggaccaaggtggaaatcaaacgg

SEQ ID NO: 461 - DNA, 324 bp, Homo sapiens
gacatccagatgacccagtctccatcctccctgtctgcatctgtaggagaccgtgtcaccatcacttgccaggcaagtcagcatattggtgaggagttactttggtaccagcagaaaccagggaaagaccctaagctcctgatctattctggttccacgttgcaaagtggggtcccatcacgtttcagtggcagtggatctgggacagatttcactctcaccatcagcagtctgcaacctgaagattttgctacgtactactgtcaacagtatcttgtgtggcctaatacgttcggccaagggaccaaggtggaaatcaaacgg

SEQ ID NO: 462 - DNA, 324 bp, Homo sapiens
gacatccagatgacccagtctccatcctccctgtctgcatctgtaggagaccgtgtcaccatcacttgccgggcaagtcagaatattaagacttcgttattgtggtatcagcagaaaccagggaaagcccctaagctcctgatctattgggcttccaggttgcaaagtggggtcccatcacgtttcagtggcagtggatctgggacagatttcactctcaccatcagcagtctgcaacctgaagattttgctacgtactactgtcaacagactttggattggccttttacgttcggccaagggaccaaggtggaaatcaaacgg

SEQ ID NO: 463 - DNA, 324 bp, Homo sapiens
gacatccagatgacccagtctccatcctccctgtctgcatctgtaggagaccgtgtcaccatcacttgccgggcaagtcagccgatttggtataagttaaattggtatcagcaaaaaccagggaaagcccctaagctcctgatctatgcggcttccatgttgcaaagtggggtcccatcacgtttcagtggcagtggatctgggacagatttcactctcaccatcagcagtctgcaacctgaagattttgctacgtactactgtcaacagcagcttattcatccttatacgttcggccaagggaccaaggtggaaatcaaacgg

SEQ ID NO: 464 - DNA, 324 bp, Homo sapiens
gacatccagatgacccagtctccatcctccctgtctgcatctgtaggagaccgtgtcaccatcacttgccgggcaagtcaggatattgataataatttatggtggtatcagcagaaaccagggaaagcccctaagctcctgatctattcggcttccttgttgcaaagtggggtcccatcacgtttcagtggcagtggatctgggacagatttcactctcaccatcagcagtctgcaacctgaagattttgctacgtactactgtcaacaggcttggacgagtcctaagacgttcggccaagggaccaaggtggaaatcaaacgg

SEQ ID NO: 465 - DNA, 324 bp, Homo sapiens
gacatccagatgacccagtctccatcctccctgtctgcatctgtaggagaccgtgtcaccatcacttgccgggcaagtcagtctattagtgagtatttatattggtatcagcagaaaccagggaaagcccctaagctcctgatctatcatgcgtccgttttgcaacgtggggtcccatcacgtttcagtggcagtggatctgggacagatttcactctcaccatcagcagtctgcaacctgaagattctgctacgtactactgtcaacagtatgcgttttctcctaggacgttcggccaagggaccaaggtggaaatcaaacgg

SEQ ID NO: 466 - DNA, 324 bp, Homo sapiens
gacatccagatgacccagtctccatcctccctgtctgcatctgtaggagaccgtgtcaccatcacttgccgggcaagtcaggggattcatattagtttacagtggtaccagcagaaaccagggaaagcccctaagctcctgatctatcaggggtccattttgcaaagtggggtcccatcacgtttcagtggcagtggatctgggacagatttcactcttaccatcagcagtctgcaacctgaagattttgctacgtactactgtcaacagcagtatcattttccttttacgttcggccaagggaccaaggtggaaatcaaacgg

SEQ ID NO: 467 - DNA, 324 bp, Homo sapiens
gacatccagatgacccagtctccatcctccctgtctgcatctgtaggagaccgtgtcaccatcacttgccgggcaagtcagcctattttgcgtgcgttagcgtggtatcagcagaaaccagggaaagcccctaagctcctgatctatttgtcgtcccatttgcaaagtggggtcccatcacgtttcagtggcagtggatctgggacagatttcactctcaccatcagcagtctgcaacctgaagattttgctacgtactactgtcaacagaggtgggtgcagccttatacgttcggccaagggaccacggtggaaatcaaacgg

SEQ ID NO: 468 - DNA, 324 bp, Homo sapiens
gacatccagatgacccagtctccatcctccctgtctgcatctgtaggagaccgtgtcgccatcacttgccgggcaagtcagaggattatgaaggcgttaaattggtatcagcagaaaccagggaaagcccctaagctcctgatctatcaggcgtcccttttgcaaagtggggtcccatcacgtttcagtggcggtggatctgggacagatttcactctcaccatcagcagtctgcaacctgaagatttggctacgtactactgtcaacagacggatgtttggccttttacgttcggccaagggaccaaggtggaaatcaaacgg

SEQ ID NO: 469 - DNA, 324 bp, Homo sapiens
gacatccagatgacccagtctccatcctccctgtctgcatctgtaggagaccgtgtcaccatcacttgccgggcaagtcaggtgattgatcggactttatattggtaccagcagaaaccagggaaagcccctaagctcctgatctataatgtttcctttctgcaaagtggggtcccatcacgtttcagtggcagtggatctgggacagatttcactctcaccatcagcagtctgcaacctgaagattttgctacgtactactgtcaacagtatgagtcgaagccttatacgttcggccaagggaccaaggtggaaatcaaacgg

SEQ ID NO: 470 - DNA, 324 bp, Homo sapiens
gacatccagatgacccagtctccatcctccctgtctgcatctgtaggagaccgtgtcaccatcacttgccgggcaagtcagccgattaatacttttttatattggtaccagcagaaaccagggaaagcccctaggctcctgatctataagtcgtccattttgcaaagtggggtcccatcacgtttcagtggcagtggatctgggacagatttcactctcaccatcagcagtctgcaacctgaagattttgctacgtactactgtcaacagtataatctgtatccttttacgttcggccaagggaccaaggtggaaatcaaacgg

SEQ ID NO: 471 - DNA, 324 bp, Homo sapiens
gacatccagatgacccagtctccatcctccctgtcagcatctgtaggagaccgtgtcaccatcacttgccgggcaagtcagaatattgatcgtgagttacgttggtaccagcagaaaccagggaaagcccctatgctcctgatctatcatgcgtccaggttgcaaagtggggtcccatcacgtttcagtggcagtggatctgggacagatttcactctcactatcagcagtctgcaacctgaagattttgctacgtactactgtcaacagtatgctaattggcctctgacgttcggccaagggaccaaggtggaaatcaaacgg

SEQ ID NO: 472 - DNA, 324 bp, Homo sapiens
gacatccagatgacccagtctccatcctccctgtcagcatctgtaggagaccgtgtcaccatcacttgccgggcaagtcagtcgattggtcgtgagttacgttggtaccagcagaaaccagggaaagcccctatgttcctgatctatcatgcgtccaggttgcaaagtggggtcccatcacgtttcagtggcagtggatctgggacagatttcactctcactatcagcagtctgcaacctgaagattttgctacgtactactgtcaacagtatcatagttggcctctgacgttcggccaagggaccaaggtggaaatcaaacgg

SEQ ID NO: 473 - DNA, 324 bp, Homo sapiens
gacatccagatgacccagtctccatcctccctgtcagcatctgtaggagaccgtgtcaccatcacttgccgggcaagtcagtctattgggcgtgagttacgttggtaccagcagaaaccagggaaagcccctatgttcctgatctatcatgcgtccaggttgcaaagtggggtcccatcacgtttcagtggcagtggatctgggacagatttcactctcactatcagcagtctgcaacctgaagattttgctacgtactactgtcaacagtattttcattggcctctgacgttcggccaagggaccaaggtggaaatcaaacgg

SEQ ID NO: 474 - DNA, 324 bp, Homo sapiens
gacatccagatgacccagtctccatcctccctgtcagcatctgtaggagaccgtgtcaccatcacttgccgggcaagtcagtcgattggtcgtgagttacgttggtaccagcagaaaccagggaaagcccctatgttcctgatctatcatgcgtccaggttgcaaagaggggtcccatcacgtttcagtggcagtggatctgggacagatttcactctcactatcagcagtctgcaacctgaagattttgctacgtactactgtcaacagtatcatagttggcctctgacgttcggccaagggaccaaggtggaaatcaaacgg

SEQ ID NO: 475 - DNA, 324 bp, Homo sapiens
gacatccagatgacccagtctccatcctccctgtcagcatctgtaggagaccgtgtcaccatcacttgccgggcaagtcagaatattggtcgtgagttacgttggtaccagcagaaaccagggaaagcccctatgttcctgatctatcatgcgtccaggttgcaaagtggggtcccatcacgtttcagtggcagtggatctgggacagatttcactctcactatcagcagtctgcaacctgaagattttgctacgtactactgtcaacagtataattcgtggcctctgacgttcggccaagggaccaaggtggaaatcaaacgg

SEQ ID NO: 476 - DNA, 324 bp, Homo sapiens
gacatccagatgacccagtctccatcctccctgtcagcatctgtaggagaccgtgtcaccatcacttgccgggcaagtcagcatattggggttgagttacgttggtaccagcagaaaccaggggaagcccctatgttcctgatctatcatgcgtccaggttgcaaagtggggtcccatcacgtttcagtggcagtggatctgggacagatttcactctcactatcagcagtctgcaacctgaagattttgctacgtactactgtcaacagtattatgggtggcctctgacgttcggccaagggaccaaggtggaaatcaaacgg

SEQ ID NO: 477 - DNA, 324 bp, Homo sapiens
gacatccagatgacccagtctccatcctccctgtcagcatctgtaggagaccgtgtcaccatcacttgccgggcaagtcagtggattggtagggagttacgttggtaccagcagaaaccagggaaagcccctatgttcctgatctatcatgcgtccaggttgcaaagtggggtcccatcacgtttcagtggcagtggatctgggacagatttcactctcactatcagcagtctgcaacctgaagattttgctacgtactactgtcaacagtatcatgggtggcctctgacgttcggccaagggaccaaggtggaaatcaaacgg

SEQ ID NO: 478 - DNA, 324 bp, Homo sapiens
gacatccagatgacccagtctccatcctccctgtcagcatctgtaggagaccgtgtcaccatcacttgccgggcaagtcagtctattactaaggagctacgttggtaccagcagaaaccagggaaagcccctatgctcctgatctatcatgcgtccaggttgcaacgtggggtcccatcacgtttcagtggcagtggatctgggacagatttcactctcactatcagcagtctgcaacctgaagattttgctacgtactactgtcaacagtatcattcttggcctctgacgttcggccaagggaccaaggtggaaatcaaacgg

SEQ ID NO: 479 - DNA, 324 bp, Homo sapiens
gacatccagatgacccagtctccatcctccctgtcagcatctgtaggagaccgtgtcgccatcacttgccgggcaagtcaggggattgggcgggagttacgttggtaccagcagaaaccagggaaagcccctatgctcctgatccatcatgcgtccaggttgcaaagtggggtcccatcacgtttcagtggcagtggatctgggacagatttcactctcactatcagcagtctgcaacctgaagattttgctacgtactactgtcaacagtataatcgttggcctctgacgttcggccaagggaccaaggtggaaatcaaacgg

SEQ ID NO: 480 - DNA, 324 bp, Homo sapiens
gacatccagatgacccagtctccatcctccctgtcagcatctgtaggagaccgtgtcaccatcacttgccgggcaagtcagaatattgggcgtgagttacgttggtaccagcagaaaccaggggaagcccctatgctcctgatctatcatgcgtccaggttgcaaagtggggtcccatcacgtttcagtggcagtggatctgggacagatttcactctcactatcagcagtctgcaacctgaagattttgctacgtactactgtcaacagtatttttattggcctctgacgttcggccaagggaccaaggtggaaatcaaacgg

SEQ ID NO: 481 - DNA, 324 bp, Homo sapiens
gacatccagatgacccagtctccatcctccctgtcagcatctgtaggagaccgtgtcaccatcacttgccgggcaagtcagaatattactcgggagttacgttggtaccagcagaaaccagggaaagcccctatgctcctgatctatcatgcgtccaggttgcaaagtggggtcccatcacgtttcagtggcagtggatctgggacagatttcactctcactatcagcagtctgcaacctgaagattttgctacgtactactgtcaacagtatcatgggtggcctctgacgttcggccaagggaccaaggtggaaatcaaacgg

SEQ ID NO: 482 - DNA, 324 bp, Homo sapiens
gacatccagatgacccagtctccgtcctccctgtcagcatctgtaggagaccgtgtcaccatcacttgccgggcaagtcaggcgattggtcgggagttacgttggtaccagcagaaaccagggaaagcccctatgctcctgatccatcatgcgtccaggttgcaaagtggggtcccatcacgtttcagtggcagtggatctgggacagatttcactctcactatcagcagtctgcaacctgaagatttcgctacgtactactgtcaacagtataatggttggcctctgacgttcggccaagggaccaaggtggaaatcaaacgg

SEQ ID NO: 483 - DNA, 324 bp, Homo sapiens
gacatccagatgacccagtctccatcctccctgtcagcatctgtaggagaccgtgtcaccatcacttgccgggcaagtcaggatattggtcgggagttacgttggtaccagcagaaaccagggaaagcccctatgttcctgatctatcatgcgtccaggttgcaaagtggggtcccatcacgtttcagtggcagtggatctgggacagatttcactctcactatcagcagtctgcaacctgaagattttgctacgtactactgtcaacagtatggtttttggcctctgacgttcggccaagggaccaaggtggaaatcaaacgg

SEQ ID NO: 484 - DNA, 324 bp, Homo sapiens
gacatccagatgacccagtctccatcctccctgtcagcatctgtaggagaccgtgtcaccatcacttgccgggcaagtcaggatattacgaaggagttacgctggtaccagcagaaaccagggaaagcccctatgctcctgatccatcatgcgtccaggttgcaaagtggggtcccatcacgtttcagtggcagtggatctgggacagatttcactctcactatcagcagtctgcaacctgaagattttgctacgtactactgtcaacagtatcattcgtggcctctgacgttcggccaagggaccaaggtggaaatcaaacgg

SEQ ID NO: 485 - DNA, 324 bp, Homo sapiens
gacatccagatgacccagtctccatcctccctgtcagcatctgtaggagaccgtgtcaccatcacttgccgggcaagtcagtctattgggcgtgagttacgttggtaccagcagaaaccagggaaagcccctatgttcctgatctatcatgcgtccaggttgcaaagtggggtcccatcacgtttcagtggcagtggatctgggacagatttcactctcactatcagcagtctgcaacctgaagattttgctacgtactactgtcaacagtattatctttggcctctgacgttcggccaagggaccaaggtggaaatcaaacgg

SEQ ID NO: 486 - DNA, 324 bp, Homo sapiens
gacatccagatgacccagtctccatcctccctgtcggcatctgtaggagaccgtgtcaccatcacttgccgggcaagtcagcgtattggtgttgagttacgttggtaccagcagaaaccagggaaagcccctatgcccctgatctatcatgcgtccaggttgcaaagtggggtcccatcacgtttcagtggcagtggatctgggacagatttcactctcactatcagcagtctgcaacctgaagattttgctacgtactactgtcaacagtattttgggtggcctctgacgttcggccaagggaccaaggtggaaatcaaacgg

SEQ ID NO: 487 - DNA, 324 bp, Homo sapiens
gacatccagatgacccagtctccatcctccctgtcagcatctgtaggagaccgtgtcaccatcacttgccgggcaagtcagtggattgatcgtgagttacgttggtaccagcagaaaccagggaaagcccctatgctcctgatctatcatgcgtccaggttgcaaagtggggtcccatcacgtttcagtggcagtggatctgggacagatttcactctcactatcagcagtctgcaacctgaagattttgctacgtactactgtcaacagtatcatggttggcctctgacgttcggccaagggaccaaggtggaaatcaaacgg

SEQ ID NO: 488 - DNA, 324 bp, Homo sapiens
gacatccagatgacccagtctccatcctccctgtcagcatctgtaggagaccgtgtcaccatcacttgccgggcaagtcagtcgatttttaaggagttacgttggtaccagcagaaaccagaggaagcccctatgctcctgatccatcatgcgtccaggttgcaaagtggggtcccatcacgtttcagtggcagtggatctgggacagatttcactctcactatcagcagtctgcaacctgaagattttgctacgtactactgtcaacagtatcatggttggcctctgacgttcggccaagggaccaaggtggaaatcaaacgg

SEQ ID NO: 489 - DNA, 324 bp, Homo sapiens
gacatccagatgacccagtctccatcctccctgtcagcatctgtaggagaccgtgtcaccatcacttgccgggcaagtcaggagattgggcgtgagttacgttggtaccagcagaaaccaggggaagcccctatgcccctgatctaccatgcgtccaggttgcaaagtggggtcccatcacgtttcagtggcagtggatctgggacagatttcactctcactatcagcagtctgcaacctgaagatttcgctacgtactactgtcaacagtattttacgtggcctctgacgttcggccaagggaccaaggtggaaatcaaacgg

SEQ ID NO: 490 - DNA, 324 bp, Homo sapiens
gacatccagatgacccagtctccatcctccctgtcagcatctgtaggagaccgtgtcaccatcacttgccgggcaagtcagcctattggtattgagttacgttggtaccagcagaaaccagggaaagcccctatgcccctgatctatcatgcgtccaggttgcaaagtggggtcccatcacgtttcagtggcagtggatctgggacagatttcactctcactatcagcagtctgcaacctgaagattttgctacgtactactgtcaacagtatcatggttggcctctgacgttcggccaagggaccaaggtggaaatcaaacag

SEQ ID NO: 491 - DNA, 324 bp, Homo sapiens
gacatccagatgacccagtctccatcctccctgtcagcatctgtaggagaccgtgtcaccatcacttgccgggcaagtcagtctattggccgggagttacgttggtaccagcagaaaccagggaaagcccctatgctcctgatctatcatgcgtccaggttgcgaagtggggtcccatcacgtttcagtggcagtggatctgggacagatttcactctcactatcagcagtctgcaacctgaagattttgctacgtactactgtcaacagtataatggttggcctctgacgttcggccaagggaccaaggtggaaatcaaacgg

SEQ ID NO: 492 - DNA, 324 bp, Homo sapiens
gacatccagatgacccagtctccatcctccctgtcagcatctgtaggagaccgtgtcaccatcacttgccgggcaagtcagtctattggtcgggagttacgttggtaccagcagaaaccagggaaagcccctatgttcctgatctatcatgcgtccaggttgcaaagtggggtcccatcacgtttcagtggcagtggatctgggacagatttcactctcactatcagcagtctgcaacctgaagattttgctacgtactactgtcaacagtattatgattggcctctgacgttcggccaagggaccaaggtggaaatcaaacgg

SEQ ID NO: 493 - DNA, 324 bp, Homo sapiens
gacatccagatgacccagtctccatcctccctgtcagcatctgtaggagaccgtgtcaccatcacttgccgggcaagtcagcctattggtcgggagttacgttggtaccagcagaaaccagggaaagcccctatgttcctgatctatcatgcgtccaggttgcaaagtggggtcccatcacgtttcagtggcagtggatctgggacagatttcactctcactatcagcagtctgcaacctgaagattttgctacgtactactgtcaacagtattctgggtggcctctgacgttcggccaagggaccaaggtggaaatcaaacgg

SEQ ID NO: 494 - DNA, 324 bp, Homo sapiens
gacatccagatgacccagtctccatcctccctgtcagcatctgtaggagaccgtgtcaccatcacttgccgggcaagtcagtggattggtagggagttacgttggtaccagcagaaaccagggaaagcccctatgctcctgatctatcatgcgtccaggttgcaaagaggggtcccatcacgtttcagtggcagtggatctgggacagatttcactctcactatcagcagtctgcaacctgaagattttgctacgtactactgtcaacagtatcatgggtggcctctgacgttcggccaagggaccaaggtggaaatcaaacgg

SEQ ID NO: 495 - DNA, 324 bp, Homo sapiens
gacatccagatgacccagtctccatcctccctgtcagcatctgtaggagaccgtgtcaccatcacttgccgggcaagtcagtggattggtagggagttacgttggtaccagcagaaaccagggaaagcccctaagctcctgatctatcatgcgtccaggttgcaaagaggggtcccatcacgtttcagtggcagtggatctgggacagatttcactctcactatcagcagtctgcaacctgaagattttgctacgtactactgtcaacagtatcatgggtggcctctgacgttcggccaagggaccaaggtggaaatcaaacgg

SEQ ID NO: 496 - DNA, 324 bp, Homo sapiens
gacatccagatgacccagtctccatcctccctgtcagcatctgtaggagaccgtgtcaccatcacttgccgggcaagtcagtggattggtagggagttacgttggtaccagcagaaaccaggggaagcccctatgttcctgatctatcatgcgtccaggttgcaaagaggggtcccatcacgtttcagtggcagtggatctgggacagatttcactctcactatcagcagtctgcaacctgaagattttgctacgtactactgtcaacagtatcatgggtggcctctgacgttcggccaagggaccaaggtggaaatcaaacgg

SEQ ID NO: 497 - DNA, 324 bp, Homo sapiens
gacatccagatgacccagtctccatcctccctgtcagcatctgtaggagaccgtgtcaccatcacttgccgggcaagtcagtggattggtagggagttacgttggtaccagcagaaaccagggaaagcccctatgttcctgatccatcatgcgtccaggttgcaaagaggggtcccatcacgtttcagtggcagtggatctgggacagatttcactctcactatcagcagtctgcaacctgaagattttgctacgtactactgtcaacagtatcatgggtggcctctgacgttcggccaagggaccaaggtggaaatcaaacgg

SEQ ID NO: 498 - DNA, 324 bp, Homo sapiens
gacatccagatgacccagtctccatcctccctgtcagcatctgtaggagaccgtgtcaccatcacttgccgggcaagtcagtggattggtagggagttacgttggtaccagcagaaaccaggggaagcccctatgttcctgatccatcatgcgtccaggttgcaaagaggggtcccatcacgtttcagtggcagtggatctgggacagatttcactctcactatcagcagtctgcaacctgaagattttgctacgtactactgtcaacagtatcatgggtggcctctgacgttcggccaagggaccaaggtggaaatcaaacgg

SEQ ID NO: 499 - DNA, 324 bp, Homo sapiens
gacatccagatgacccagtctccatcctccctgtcagcatctgtaggagaccgtgtcaccatcacttgccgggcaagtcagtggattggtagggagttacgttggtaccagcagaaaccagggaaagcccctaagttcctgatctatcatgcgtccaggttgataaaaggggtcccatcacgtttcagtggcagtggatctgggacagatttcactctcactatcagcagtctgcaacctgaagattttgctacgtactactgtcaacagtatcatgggtggcctctgacgttcggccaagggaccaaggtggaaatcaaacgg

SEQ ID NO: 500 - DNA, 324 bp, Homo sapiens
gacatccagatgacccagtctccatcctccctgtcagcatctgtaggagaccgtgtcaccatcacttgccgggcaagtcagtggattggtagggagttacgttggtaccagcagaaaccagggaaagcccctaagttcctgatctatcatgcgtccaggttgcaaagaggggtcccatcacgtttcagtggcagtggatctgggacagatttcactctcactatcagcagtctgcaacctgaagattttgctacgtactactgtcaacagtatcatgggtttcctctgacgttcggccaagggaccaaggtggaaatcaaacgg

SEQ ID NO: 501 - DNA, 324 bp, Homo sapiens
gacatccagatgacccagtctccatcctccctgtcagcatctgtaggagaccgtgtcaccatcacttgccgggcaagtcagtggattggtagggagttacgttggtaccagcagaaaccagggaaagcccctaagttcctgatctatcatgcgtccaggttgtacaaaggggtcccatcacgtttcagtggcagtggatctgggacagatttcactctcactatcagcagtctgcaacctgaagattttgctacgtactactgtcaacagtatcatgggtggcctctgacgttcggccaagggaccaaggtggaaatcaaacgg

SEQ ID NO: 502 - DNA, 324 bp, Homo sapiens
gacatccagatgacccagtctccatcctccctgtcagcatctgtaggagaccgtgtcaccatcacttgccgggcaagtcagtggattggtagggagttacgttggtaccagcagaaaccagggaaagcccctaagttcctgatctatcatgcgtccaggttgcaatcaggggtcccatcacgtttcagtggcagtggatctgggacagatttcactctcactatcagcagtctgcaacctgaagattttgctacgtactactgtcaacagtatcatgggtggcctctgacgttcggccaagggaccaaggtggaaatcaaacgg

SEQ ID NO: 503 - DNA, 324 bp, Homo sapiens
gacatccagatgacccagtctccatcctccctgtcagcatctgtaggagaccgtgtcaccatcacttgccgggcaagtcagtggattggtagggagttacgttggtaccagcagaaaccagggaaagcccctaagctgctgatctatcatgcgtccaggttgcaatcaggggtcccatcacgtttcagtggcagtggatctgggacagatttcactctcactatcagcagtctgcaacctgaagattttgctacgtactactgtcaacagtatcatgggtggcctctgacgttcggccaagggaccaaggtggaaatcaaacgg

SEQ ID NO: 504 - DNA, 324 bp, Homo sapiens
gacatccagatgacccagtctccatcctccctgtcagcatctgtaggagaccgtgtcaccatcacttgccgggcaagtgcatggattggtagggagttacgttggtaccagcagaaaccagggaaagcccctaagttcctgatctatcatgcgtccaggttgataaaaggggtcccatcacgtttcagtggcagtggatctgggacagatttcactctcactatcagcagtctgcaacctgaagattttgctacgtactactgtcaacagtatcatgggtggcctctgacgttcggccaagggaccaaggtggaaatcaaacgg

SEQ ID NO: 505 - DNA, 324 bp, Homo sapiens
gacatccagatgacccagtctccatcctccctgtcagcatctgtaggagaccgtgtcaccatcacttgccgggcaagtggatggattggtagggagttacgttggtaccagcagaaaccagggaaagcccctaagttcctgatctatcatgcgtccaggttgtacaaaggggtcccatcacgtttcagtggcagtggatctgggacagatttcactctcactatcagcagtctgcaacctgaagattttgctacgtactactgtcaacagtatcatgggtggcctctgacgttcggccaagggaccaaggtggaaatcaaacgg

SEQ ID NO: 506 - DNA, 324 bp, Homo sapiens
gacatccagatgatccagtctccatcctccctgtcagcatctgtaggagaccgtgtcaccatcacttgccgggcaagtcagtggattggtagggagttacgttggtaccagcagaaaccagggaaagcccctaagctgctgatccatcatgcgtccaggttgcaaagaggggtcccatcacgtttcagtggcagtggatctgggacagatttcactctcactatcagcagtctgcaacctgaagattttactacgtactactgtcaacagtatcatgggtggcctctgacgttcggccaagggaccaaggtggaaatcaaacgg

SEQ ID NO: 507 - DNA, 324 bp, Homo sapiens
gacatccagatgacccagtctccatcctccctgtcagcatctgtaggagaccgtgtcaccatcacttgccgggcaagtcagtggattggtagggagttacgttggtaccagcagaaaccagggaaagcccctaagccgctgatctatcatgcgtccaggttgcaaagaggggtcccatcacgtttcagtggcagtggatctgggacagatttcactctcactatcagcagtctgcaacctgaagattttgctacgtactactgtcaacagtatcatgggtggcctctgacgttcggccaagggaccaaggtggaaatcgaacgg

SEQ ID NO: 508 - DNA, 324 bp, Homo sapiens
gacatccagatgacccagtctccatcctccctgtcagcatctgtaggagaccgtgtcaccatcacttgccgggcaagtcagtggattggtagggagttacgttggtaccagcagaaaccagggaaagaccctaagccgctgatctatcatgcgtccaggttgcaaagaggggtcccatcacgtttcagtggcagtggatctgggacaggtttcactctcactatcagcagtctgcaacctgaagattttgctacgtactactgtcaacagtatcatgggtggcctctgacgttcggccaagggaccaaggtggaaatcaaacgg

SEQ ID NO: 509 - DNA, 324 bp, Homo sapiens
gacatccagatgacccagtctccatcctccctgtcagcatctgtaggagaccgtgtcaccatcacttgccgggcaagtcagtggattggtagggagttacgttggtaccagcagaaaccagggaaagaccctaaggtgctgatctttcatgcgtccaggttgcaaagaggggtcccatcacgtttcagtggcagtggatctgggacagatttcactctcactatcagcagtctgcaacctgaagattttgctacgtactactgtcaacagtatcatgggtggcctctgacgttcggccaagggaccaaggtggaaatcaaacgg

SEQ ID NO: 510 - DNA, 324 bp, Homo sapiens
gacatccagatgacccagtctccatcctccctgtcagcatctgtaggagaccgtgtcaccatcacttgccgggcaagtcagtggattggtagggagttacgttggtaccagcagaaaccagggaaagcccctaagcagctgatctatcatgcgtccaggttgcaaagaggggtcccatcacgtttcagtggcagtggatctgggacagatttcactctcactatcagcagtctgcaacctgaagattttaccacgtactactgtcaacagtatcatgggtggcctctgacgttcggccaagggaccaaggtggaaatcaaacgg

SEQ ID NO: 511 - DNA, 324 bp, Homo sapiens
ggcatccagatgacccagtctccatcctccctgtcagcatctgtaggagaccgtgtcaccatcacttgccgggcaagtcagtggattggtagggagttacgttggtaccagcagaaaccagggaaagcctctaagccgctgatctatcatgcgtccaggttgcaaagaggggtcccatcacgtttcagtggcagtggatctgggacagatttcactctcactatcagcagtctgcaacctgaagattttgctacgtactactgtcaacagtatcatgggtggcctctgacgttcggccaagggaccaaggtggaaatcaaacgg

SEQ ID NO: 512 - DNA, 324 bp, Homo sapiens
gacatccagatgacccagtctccatcctccctgtcagcatctgtaggagaccgtgtcaccatcacttgccgggcaagtcagtggattggtagggagttacgttggtaccagcagaaaccagggaaagaccctaagctgctgatccatcatgcgtccaggttgcaaagaggggtcccatcacgtttcagtggcagtggatctgggacagatttcactctcactatcagtagtctgcaacctgaagattttgctacgtactactgtcaacagtatcatgggtggcctctgacgttcggccaagggaccaaggtggaaatcaaacgg

SEQ ID NO: 513 - DNA, 324 bp, Homo sapiens
gacatccagatgacccagtttccatcctccctgtcagcatctgtaggagaccgtgtctccatcacttgccgggcaagtcagtggattggtagggagttacgttggtaccagcagaaaccagggaaagaccctaagccgctgatctatcatgcgtccaggttgcaaagaggggtcccatcacgtttcagtggcagtggatctgggacagatttcactctcactatcagcagtctgcaacctgaagatttagctacgtactactgtcaacagtatcatgggtggcctctgacattcggccaagggaccaaggtggaaatcaaacgg

SEQ ID NO: 514 - DNA, 324 bp, Homo sapiens
gacatccagatgacccagtctccatcctccctgtcagcatctgtaggagaccgtgtcaccatcacttgccgggcaagtcagtggattggtagggagttacgttggtaccagcagaaaccagggaaagcccctaagccgctgatctatcatgcgtccaggttgcaaagaggggtcccatcacgtttcagtggcagtggatctgggacagatttcactctcactatcagcagtctgcaacctgaagattttgctacgtactactgtcaacagtatcatgggtggcctctgacgttcggccaagggaccaaggtggaaatcaaacgg

SEQ ID NO: 515 - DNA, 324 bp, Homo sapiens
gacatccagatgacccagtctccatcctccctgtcagcatctgtaggagaccgtgtcatcatcacttgccgggcaagtcagtggattggtagggagttacgttggtaccagcagaaaccagggaaagcccctaagctgctgatctttcatgcgtccaggttgcaaagaggggtcccatcacgtttcagtggcagtggatctgggacagatttcactctcactatcagcagtctgcaacctgaagattttgctacgtactactgtcaacagtatcatgggtggcctctgacgttcggccaagggaccaaggtggaaatcaaacgg

SEQ ID NO: 516 - DNA, 324 bp, Homo sapiens
gacatccagatgacccagtctccatcctccctgtcagcatctgtaggagaccgtgtcaccatcacttgccgggcaagtcagtggattggtagggagttacgttggtaccagcagaaaccagggaaatcccctaagccgctgatctatcatgcgtccaggttgcaaagaggggtcccatcacgtttcagtggcagtggatctgggacagatttcactctcattatcagcagtctgcaacctgaagattttgctacgtactactgtcaacagtatcatgggtggcctctgacgctcggccaagggaccaaggtggaaatcaaacgg

SEQ ID NO: 517 - DNA, 324 bp, Homo sapiens
gacatccagatgacccagtctccaccctccctgtcagcatctgtaggagaccgtgtcaccatcacttgccgggcaagtcagtggattggtagggagttacgttggtgccagcagaaaccagggaaagcccctaagctgctgatctttcatgcgtccaggttgcaaagaggggtcccatcacgtttcagtggcagtggatctgggacagatttcactctcactatcagcagtctgcaacctgaagattttgctacgtactactgtcaacagtatcatgggtggcctctgacgttcggccaagggaccaaggtggaaatcaaacgg

SEQ ID NO: 518 - DNA, 324 bp, Homo sapiens
gacatccagatgacccagtctccatcctccctgtcagcatctgtaggagaccgtgtcaccatcacttgccgggcaagtcagtggattggtagggagttacgttggtaccagcagaaaccagggaaagcccctaagctgctgatccatcatgcgtccaggttgcaaagaggggtcccatcacgtttcagtggcagtggatctgggacagatttcactctcactatcagcagtctgcaacctgaagattttgctacgtactactgtcaacagtatcatgggtggcctctgacgttcggccaagggaccaaggtggaaatcaaacgg

SEQ ID NO: 519 - DNA, 324 bp, Homo sapiens
gacatccagatgacccagtctccatcctctctgtcagcatctgtaggagaccgtgtcaccatcacttgccgggcaagtcagtggattggtagggagttacgttggtaccagcagaaaccagggaaagcccctaagctgctgatccatcatgcgtccaggttgcaaagaggggtcccatcacgtttcagtggcagtggatctggggcagatttcactctcactatcagcagtctgcaacctgaagattttgctacgtactactgtcaacagtatcatgggtggcctctgacgttcggccaatggaccaaggtggaaatcaaacgg

SEQ ID NO: 520 - DNA, 324 bp, Homo sapiens
gacatccagatgacccagtctccatcctccctgtcagcatctgtaggagaccgtgtcaccatcacttgccgggcaagtcagtggattggtagggagttacgttggtaccagcagaaaccagggaaagcccctaagctgctgttccatcatgcgtccaggttgcaaagaggggtcccatcacgtttcagtggcagtggatctgggacagatttcactctcactatcagcagtctgcaacctgaagattttgctacatactactgtcaacagtatcatgggtggcctctgacgttcggccaagggaccaaggtggaaatcaaacgg

SEQ ID NO: 521 - DNA, 324 bp, Homo sapiens
gacatccagatgacccagtctccatcctccctgtcagcatctgtaggagaccgtgtcaccatcacttgccgggcaagtcagtggattggtagggagttacgttggtaccagcagaaaccagggaaagcccctaagctgctgatctttcatgcgtccaggttgcaaagaggggtcccatcacgtttcagtggcagtggatctgggacagatttcactctcactatcagcagtctgcaacctgaagattttgctacgtactactgtcaacagtatcatgggtggcctctgacgttcggccaagggacaaaggtggaaatcaaacgg

SEQ ID NO: 522 - DNA, 324 bp, Homo sapiens
gacatccagatgacccagtctccatcctccctgtcagcatctgtaggagaccgtgtcaccatcacttgccgggcaagtcagtggattggtagggagttacgttggtaccagcagaaaccagggaaagcccctatgccgctgatctatcatgcgtccagattgcaaagaggggtcccatcacgtttcagtggcagtggatctgggacagatttcactctcactatcagcagtctgcaacctgaagattttgctacgtactactgtcaacagtatcatgggtggcctctgacgttcggccaagggaccaaggtggaaatcaaacgg

SEQ ID NO: 523 - DNA, 324 bp, Homo sapiens
gacatccagatgacccagtctccatcctccctgtcagcatctgtaggagaccgtgtcaccatcacttgccgggcaagtcagtggattggtagggagttacgttggtaccagcagaaaccagggaaagcccctaagctgctgatctttcatgcgtccaggttgcaaagaggggtcccatcacgtttcagtggcagtggatctgggacagatttcactctcactatcagcagtctgcaacctgaagattttgctgcgtactactgtcaacagtatcatgggtggcctctgacgttcggccaagggaccaaggtggaaatcaaacgg

SEQ ID NO: 524 - DNA, 324 bp, Homo sapiens
gacatccagatgacccagtctccatcctccctgtcagcatctgtaggagaccgtgtcaccatcacttgccggacaagtcagtggattggtagggagttacgttggtaccagcagaaaccagggaaagcccctaagctgctgatccatcatgcgtccaggttgcaaagaggggtcccatcacgtttcagtggcagtggatctgggacagatttcactctcactatcagcagtctgcaacctgaagattttgctacgtactactgtcaacagtatcatgggtggcctctgacgttcggccaagggaccaaggtggaaatcaaacgg

SEQ ID NO: 525 - DNA, 324 bp, Homo sapiens
gacatccagatgacccagtctccatcctccctgtcagcatctgtaggagaccatgtcaccatcacttgccgggcaagtcagtggattggtagggagttacgttgggaccagcagaaaccagggaaagcccctaagctgctgatctatcatgcgtccaggttgcaaagaggggtcccatcacgtttcagtggcagtggatctgggacagatttcactctcactatcagcagtctgcaacctgaagattttgctacgtactactgtcaacagtatcatggatggcctctgacgttcggccaagggaccaaggtggaaatcaaacgg

SEQ ID NO: 526 - DNA, 324 bp, Homo sapiens
gacatccagatgacccagtctccatcctccctgtcagcatctgtaggagaccgtgtcaccatcacctgccgggcaagtcagtggattggtagggagttacgttggtaccagcagaaaccagggaaagcccctacgccgctgatctatcatgcgtccaggttgcaaagaggggtcccatcacgtttcagtggcagtggatctgggacagatttcactctcactatcagcagtctgcaacctgaagattttgctacgtactactgtcaacagtatcatgggtggcctctgacgttcggccaagggaccaaggtggaaatcaaacgg

SEQ ID NO: 527 - DNA, 324 bp, Homo sapiens
gacatccagatgacccagtctccatcctccctgtcagcatctgtaggagaccgtgtcaccatcacttgccgggcaagtcagtggattggtagggagttacgttggtaccagcagaaaccagggaaagcccctaagcagctgatctatcatgcgtccaggttgcaaagaggggtcccatcacgtttcagtggcagtggatctgggtcagatttcactctcactatcagcagtctgcaacctgaagattttgctacgtactactgtcaacagtatcatgggtggcctctgacgttcggccaagggaccaaggcggaaatcaaacgg

SEQ ID NO: 528 - DNA, 324 bp, Homo sapiens
gacatccagatgacccagtctccatcctccctgtcagcatctgtaggagaccgtgtcgccatcacttgccgggcaagtcagtggattggtagggagttacgttggtaccagcagaaaccagggaaagcccctaagctgctgatctttcatgcgtccaggttgcaaagaggggtcccatcacgtttcagtggcagtggatctgggacagatttcactctcactatcagcagtctgcaacctgaagattttgctacgtactactgtcaacagtatcatgggtggcctctgacgttcggccaagggaccaaggtggaaatcaaacgg

SEQ ID NO: 529 - DNA, 324 bp, Homo sapiens
ggcatccagatgacccagtctccatcctccctgtcagcatctgtaggagaccgtgtcaccatcacttgccgggcaagtcagtggattggtagggagttacgttggtaccagcagaaaccagggaaagaccctaagccgctgatctatcatgcgtccaggttgcaaagaggggtcccatcacgtttcagtggcagtggatctgggacagatttcactctcactatcagcagtctgcaacctgaagattttgctacgtactactgccaacagtatcatgggtggcctctgacgttcggccaagggaccaaggtggaaatcaaacgg

SEQ ID NO: 530 - DNA, 324 bp, Homo sapiens
gacatccagatgacccagtctccatcctccctgtcagcatctgtaggagaccgtgtcaccatcacttgccgggcaagtcagtggattggtagggagttacgttggtaccagcagaaaccagggaaagcccctaaggtgctgatctttcatgcgtccaggttgcaaagaggggtcccatcacgtttcagtggcagtggatctgggacagatttcactctcactatcagcagtctgcaacctgaagattttgctacgtactactgtcaacagtatcatgggtggcctctgacgttcggccaagggaccaaggtggaaatcaaacgg

SEQ ID NO: 531 - DNA, 324 bp, Homo sapiens
gacatccagatgacccagtctccatcctccctgtcagcatctgtaggagaccgtgtcaccatcacttgccgggcaagtcagtggattggtagggagttacgttggtaccagcagaaaccagggaaagaccctaagccgctgatctatcatgcgtccaggttgcaaagaggggtcccatcacgtttcagtggcagtggatctgggacagatttcactctcactatcagcagtttgcaacctgaagattttgctacgtactactgtcaacagtatcatgggtggcctctgacgtccggccaagggaccaaggtggaaatcaaacgg

SEQ ID NO: 532 - DNA, 324 bp, Homo sapiens
gacatccagatgacccagtctccatcctccctgtcagcatctgtaggagaccgtgtcaccatcacttgccgggcaagtcagtggattggtagggagttacgttggtaccagcaggaaccaggggaagcccctaagccgctgatctatcatgcgtccaggttgcaaagaggggtcccatcacgtttcagtggcagtggatctgggacagatttcactctcactatcagcagtctgcaacctgatgattctgctacgtactactgtcaacagtatcatgggtggcctctgacgttcggccaagggaccagggtggaaatcaaacgg

SEQ ID NO: 533 - DNA, 324 bp, Homo sapiens
gacatccagatgacccagtctccatcctccctgtcagcatctgtaggagaccgtgtcaccatcacttgccgggcaagtcagtggattggtagggagttacgttggtaccagcaggaaccagggaaagcccctaagctgctgatccatcatgcgtccaggttgcaaagaggggtcccatcacgtttcagtggcagtggatctgggacagatttcactctcactatcagcagtctgcaacctgaagattttgctacgtactactgtcaacagtatcatgggtggcctctgacgttcggccaagggaccaaggtggaaatcaaacgg

SEQ ID NO: 534 - DNA, 324 bp, Homo sapiens
gacatccagatgacccagtctccatcctccctgtcagcatctgtaggagaccgtgtcaccatcacttgccgggcaagtcagtggattggtagggagttacgttggtaccagcagaaaccagggaaagcccctaagctgctgatctttcatgcgtccaggttgcaaagaggggtcccatcacgtttcagtggcagtggatctgggacagatttcactctcactatcagcagtctgcaacctgaagattatgctacgtactactgtcaacagtatcatgggtggcctctgacgttcggccaagggaccaaggtggaaatcaaacgg

SEQ ID NO: 535 - DNA, 324 bp, Homo sapiens
gacatccagatgacccagtctccatcctccctgtcagcatctgtaggagaccgtgtcaccatcacttgccgggcaagtcagtggattggtagggagttacgttggtaccagcagaaaccagggaaagcccctaacccgctgatctatcatgcgtccaggttgcaaagaggggtcccatcacgtttcagtggcagtggatctgggacagatttcactctcactatcagcagtctgcaacctgaagattttgctacgtactactgtcaacagtatcatgggtggcctctgacgttcggccaagggaccaaggtggaaatcaaacgg

SEQ ID NO: 536 - DNA, 324 bp, Homo sapiens
gacatccagatgacccagtctccatcctccctgtcagcatctgtaggagaccgtgtcaccatcacttgccgggcaagtcagtggattggtagggagttacgttggtaccagcagaaaccagggaaagcccctaagcagctgatctatcatgcgtccaggttgcaaagaggggtcccatcacgtttcagtggcagtggatctgggacagatttcactctcactatcagcagtctgcaacctgaagattttgctacgtactactgtcaacagtatcatgggtggcctctgacgtccggccaagggaccaaggtggaaatcaaacgg

SEQ ID NO: 537 - DNA, 324 bp, Homo sapiens
gacatccagatgacccagtctccatcctccctgtcagcatccgtaggagaccgtgtcaccatcacttgccgggcaagtcagtggattgatagggagttacgttggtaccagcagaaaccagggaaagcccctaagcagctgatctatcatgcgtccaggttgcaaagaggggtcccatcacgtttcagtggcagtggatctgggacagatttcactctcactatcagcagtctgcaacctgaagattttgctacgtactactgtcaacagtatcatgggtggcctctgacgttcggccaagggaccaaggtggaaatcaaacgg

SEQ ID NO: 538 - DNA, 324 bp, Homo sapiens
gacatccagatgacccagtctccatcctccctgtcagcatctgtaggagaccgtgtcaccatcacttgccgggcaagtcagtggattggcagggagttacgttggtaccagcagaaaccagggaaagcccctaagccgctgatctatcatgcgtccaggttgcaaagaggggtcccatcacgtttcagtggcagtcgatctgggacagatttcactctcactatcagcagtctgcaacctgaagattttgctacgtactactgtcaacagtatcatgggtggcctctgacgttcggccaagggaccaaggtggaaatcaaacgg

SEQ ID NO: 539 - DNA, 324 bp, Homo sapiens
gacatccagatgacccagtctccatcctccctgtcagcatctgtaggagaccgtgtcaccatcacgtgccgggcaagtcagtgggttggtagggagttacgttggtaccagcagataccagggaaagcccctaagcagctgatctatcatgcgtccaggttgcaaagaggggtcccatcacgtttcagtggcagtggatctgggacagatttcactctcactatcggcagtctgcaacctgaagattttgctacgtactactgtcaacagtatcatgggtggcctctgacgttcggccaagggaccaaggtggaaatcaaacgg

SEQ ID NO: 540 - DNA, 324 bp, Homo sapiens
gacatccagatgacccagtctccatcctccctgtcagcatctgtaggagaccatgtcaccatcacttgccgggcaagtcagtggattggtagggagttacgttgggaccagcagaaaccagggaaagcccctaagttcctgatctatcatgcgtccaggttgcaaagaggggtcccatcacgtttcagtggcagtggatctgggacagatttcactctcactatcagcagtctgcaacctgaagattttgctacgtactactgtcaacagtatcatggatggcctctgacgttcggccaagggaccaaggtggaaatcaaacgg

SEQ ID NO: 541 - DNA, 324 bp, Homo sapiens
gacatccagatgacccagtctccatcctccctgtcagcatctgtaggagaccgtgtcaccatcacttgccgggcaagtcagtggattggtagggagttacgttggtaccagcagaaaccagggaaagcccctaagggcctgatctatcatgcgtccaggttgcaaagaggggtcccatcacgtttcagtggcagtggatctgggacagatttcactctcactatcagcagtctgcaacctgaagattttgctacgtactactgtcaacagtatcatgggtggcctctgacgttcggccaagggaccaaggtggaaatcaaacgg

SEQ ID NO: 542 - DNA, 324 bp, Homo sapiens
gacatccacatgacccagtctccatcctccctgtctgcatctgtaggagaccgtgtcaccatcacttgccgggcaagtcagcatattgggcgttcgttacagtggtaccagcagaaaccagggaaagcccctaagctcctgatctattatacgtccattttgcaaagtggggtcccatcacgtttcagtggcagtggatctgggacagatttcactctcactatcagcagtctgcaacctgaagattttgctacgtactactgtcaacagcagggggagtttccttttacgttcggccaagggaccaaggtggaaatcaaacgg

SEQ ID NO: 543 - DNA, 324 bp, Homo sapiens
gacatccagatgacccagtctccatcctccctgtctgcatctgtaggagaccgtgtcaccatcacttgccgggcaagtcagcatattaagaattttttatattggtaccagcagaaaccagggaaagcccctaagctcctgatctatcatgcgtccacgttgcaaagtggggtcccatcacgtttcagtggcagtggatctgggacagatttcactctcaccatcagcagtctgcaacctgaagattttgctacgtactactgtcaacagtatatggatgagcctcgtacgttcggccaagggaccaaggtggaaatcaaacgg

SEQ ID NO: 544 - DNA, 324 bp, Homo sapiens
gacatccagatgacccagtctccatcctccctgtctgcatctgtaggagaccgtgtcaccatcacttgccgggcaagtcaggttattagtgttgctttaaattggtaccagcagaaaccagggaaagcccctaagctcctgatctatcaggggtccattttgcaaagtggggtcccatcacgtttcagtggcagtggatctgggacagatttcactctcaccatcagcagtctgcaacctgaagattttgctacgtactactgtcaacagagttggcagtggccttttacgttcggccaagggaccaaggtggaaatcaaacgg

SEQ ID NO: 545 - DNA, 324 bp, Homo sapiens
gacatccagatgacccagtctccatcctccctgtctgcatctgtaggagaccgtgtcaccatcacttgccgggcaagtcaggctattggtaatatgttatattggtaccagcagaaaccagggaaagcccctaagctcctgatctataatgcgtcctatttgcaaagtggggtcccatcacgtttcagtggcagtggatctgggacagatttcactctcaccatcagcagtctgcaacctgaagattatgctacgtactactgtcaacagagggagatgattcctcatacgttcggccaagggaccaaggtgggaatcaaacgg

SEQ ID NO: 546 - DNA, 324 bp, Homo sapiens
gacatccagatgacccagtctccatcctccctgtctgcatctgtaggagaccgtgtcaccatcacttgccgggcaagtcaggatattggtgaggagttactttggtatcagcagaaaccagggaaagcccctaagctcctgatctattcggcgtcctcgttgcgaagtggggtcccatcacgtttcagtggcagtggatctgggacagatttcactctcaccatcagcagtctgcaacctgaagattttgctacgtactactgtcaacagtatgtgacttctcctaatacgttcggccaagggaccaaggtggaaatcaaacgg

SEQ ID NO: 547 - DNA, 324 bp, Homo sapiens
gacatccagatgacccagtctccatcctccctgtctgcatctgtaggagaccgtgtcaccatcacttgccgggcaagtcaggggattcagacgtttttatattggtaccagcagaaaccagggaaagcccctaagctcctgatctattctagttccattttgcaaagaggggtcccatcacgtttcagtggcagtggatctgggacagatttcactctcaccatcagcagtctgcaacctgaagattttgctacgtactactgtcaacagtatgggaattatccttttacgttcggccaagggaccaaggtggaaatcaaacgg

SEQ ID NO: 548 - DNA, 324 bp, Homo sapiens
gacatccagatgacccagtctccatcctccctgtctgcatctgtaggagaccgtgtcaccatcacttgccgggcaagtcagaatattgatcgtgagttacgttggtaccagcagaaaccagggaaagcccctatgctcctgatctatcatgcgtccaggttgcaaagtggggtcccatcacgtttcagtggcagtggatctgggacagatttcactctcaccatcagcagtctgcaacctgaagattttgctacgtactactgtcaacagtatcatgattttcctcttacgttcggccaagggaccaaggtggaaatcaaacgg

SEQ ID NO: 549 - DNA, 324 bp, Homo sapiens
gacatccagatgacccagtctccatcctccctgtctgcatctgtaggagaccgtgtcaccatcacttgccgggcaagtcagaatattgatcgtgagttacgttggtaccagcagaaaccagggaaagcccctatgttcctgatctatcatgcgtccaggttgcaacgtggggtcccatcacgtttcagtggcagtggatctgggacagatttcactctcaccatcagcagtctgcaacctgaagattttgctacgtactactgtcaacagtatcatgattttcctcttacgttcggccaagggaccaaggtggaaatcaaacgg

SEQ ID NO: 550 - DNA, 324 bp, Homo sapiens
gacatccagatgacccagtctccatcctccctgtctgcgtctgtaggagaccgtgtcaccatcacttgccgggcaagtcagaatattgatcgtgagttacgttggtaccagcagaaaccagggaaagcccctatgttcctgatctatcatgcgtccaggttgcaacatggggtcccatcacgtttcagtggcagtggatctgggacagatttcactctcaccatcagcagtctgcaacctgaagattttgctacgtactactgtcaacagtatcatgattttcctcttacgttcggccaagggaccaaggtggaaatcaaacgg

SEQ ID NO: 551 - DNA, 324 bp, Homo sapiens
gacatccagatgacccagtctccatcctccctgtctgcatctgtaggagaccgtgtcaccatcacttgccgggcaagtcagaatattgatcgtgagttacgttggtaccagcagaaaccagggaaagcccctgtgttcctgatctatcatgcgtccaggttgcaaagtggggtcccatcacgtttcagtggcagtggatctgggacagatttcactctcaccatcagcagtctgcaacctgaagattttgctacgtactactgtcaacagtatcatgattttcctcttacgttcggccaagggaccaaggtggaaatcaaacgg

SEQ ID NO: 552 - DNA, 324 bp, Homo sapiens
gacatccagttgacccagtctccatcctccctgtctgcatctgtaggagaccgtgtcaccatcacttgccgggcaagtcagaatattgatcgtgagttacgttggtaccagcagaaaccagggaaagcccctatgttcctgatctatcatgcgtccaggttgcaaagtggggtcccatcacgtttcagtggcagtggatctgggacagatttcactctcaccatccgcagtctgcaacctgaagattttgctacgtactactgtcaacagtatcatgattttcctcttacgtccggccaagggaccaaggtggaaatcaaacgg

SEQ ID NO: 553 - DNA, 324 bp, Homo sapiens
gacatccagatgacccagtctccatcctccctgtctgcatctgtaggagaccgtgtcaccatcacttgccgggcaagtcagaatattgatcgtgagttacgttggtaccagcagaaaccagggaaagcccctatgttcctgatctatcatgcgtccaggttgcaaagtggggtcccatcacgtttcagcggcagtggatctgggacagatttcactctcaccatcagcagtctgcaacctgaagattatgctacgtactactgtcaacagtatcatgattttcctcttacgttcggccaagggaccaaggtggaaatcaaacgg

SEQ ID NO: 554 - DNA, 324 bp, Homo sapiens
gacatccagatgacccagtctccatcctccctgtctgcatctgtaggagaccgtgtcaccatcacttgccgggcaagtcagaatattgatcgtgagttacgttggtaccagcagaaaccagggaaagcccctatgttcctgatctatcatgcgtccaggttgcaaagtggggtcccatcacgtttcagtggcagtggatctgggacagatttcactctcaccatcagcagtctgcaacctgaagattttgctacgtactactgtcaacagtatcatgattttcctcttacgttcggccaagggaccaaggtggaaatcaaacgg

SEQ ID NO: 555 - DNA, 324 bp, Homo sapiens
gacatccagatgacccagtctccatcctccctgtctgcatctgtaggagaccgtgtcaccatcacttgccgggcaagtcagaatattgatcgtgagttacgttggtaccagcagaaaccagggaaagcccctatgcccctgatctatcatgcgtccaggttgcaaagaggggtcccatcacgtttcagtggcagaggatctgggacagatttctctctcaccatcagcagtctgcaacctgaagattttgctacgtactactgtcaacagtatcatgattttcctcttacgttcggccaagggaccaaggtggaaatcaaacgg

SEQ ID NO: 556 - DNA, 324 bp, Homo sapiens
gacatccagatgacccagtctccatcctccctgtctgcatctgtaggagaccgtgtcaccatcacttgccgggcaagtcagaatattggtcgtgagttacgttggtaccagcagaaaccagggaaagcccctatgttcctgatctatcatgcgtccaggttgcaaagaggggtcccatcacgtttcagtggcagtggttctgggacagatttcactctcaccatcagcagtctgcaacctgaagattttgctacgtactactgtcaacagtatcatgattttcctcttacgttcggccaggggaccaaggtggaaatcaaacgg

SEQ ID NO: 557 - DNA, 324 bp, Homo sapiens
gacatccagatgacccagtctccatcctccctgtctgcatctgtaggagaccgtgtcaccatcacttgccgggcaagtcagaatattgatcgtgagttacgttggtaccagcagaaaccagggaaagcccctaggttcctgatctatcatgcgtccaggttgcaaagtggggtcccatcacgtttcagtggcagtggatctgggacagatttcactctcaccatcagcagtctgcaacctgaagattttgctacgtactactgtcaacagtatcatgattttcctcttacgatcggccaagggaccaaggtggaaatcaaacgg

SEQ ID NO: 558 - DNA, 324 bp, Homo sapiens
gacatccagatgacccagtctccatcctccctgtctgcatctgtaggagaccgtgtcaccatcacttgccgggctagtcagaatattggtcgtgagttacgttggtaccagcagaaaccagggaaagcccctatgttcctgatctatcatgcgtccaggttgcaaagtggggtcccatcacgtttcagtggcagtggatctgggacagatttcactctcaccatcagcagtctgcaacctgaagattttgctacgtactactgtcaacagtatcatgattttcctcttacgttcggccaagggaccaaggtggaaatcaaacgg

SEQ ID NO: 559 - DNA, 324 bp, Homo sapiens
gacatccagatgacccagtctccatcctccctgtctgcatctgtaggagaccgtgtcaccatcacttgccgggcaagtcagaatattgatcgtgagttacgttggtaccagcagaaacctgggaaagaccctatgttcctgatctatcatgcgtccaggttgcaaagaggggtcccatcacgtttcagtggcagtggatctgggacatatttcactctcaccatcagcagtctgcaacctgaagattttgctacgtactactgtcaacagtatcatgattttcctcttacgttcggccaagggaccaaggtggaaatcaaacgg

SEQ ID NO: 560 - DNA, 324 bp, Homo sapiens
gacatccagatgacccagtctccatcctccctgtctgcatctgtaggagaccgtgtcaccatcacttgccgggcaagtcagaatattgatcgtgagttacgttggtaccagcagaaaccagggaaagcccctatgttcctgatctatcatgcgtccaggttgctaagtggggtcccatcacgtttcagtggcagtggatttgggacagatttcactctcaccatcagcagtctgcaacctgaagattttgctacgtactactgtcaacagtatcatgattttcctcttacgttcggccaagggaccaaggtggaaatcaaacgg

SEQ ID NO: 561 - DNA, 324 bp, Homo sapiens
gacatccagatgacccagtctccatcctccctgtcagcatctgtaggagaccgtgtcaccatcacttgccgggcaagtcagtcgattggtcgtgagttacgttggtaccagcagaaaccagggaaagcccctatgttcctgatctatcatgcgtccaggttgcaacgtggggtcccatcacgtttcagtggcagtggatctgggacagatttcactctcaccatcagcagtctgcaacctgaagattttgctacgtactactgtcaacagtatcatgattttcctcttacgttcggccaagggaccaaggtggaaatcaaacgg

SEQ ID NO: 562 - DNA, 324 bp, Homo sapiens
gacatccagatgacccagtctccatcctccctgtctgcatctgtaggagaccgtgtcaccatcacttgccgggcaagtcagaatattgatcgtgagttacgttggtaccagcagaaaccagggaaagcccctatgcccctgatctatcatgcgtccaggttgcaaagtggggtcccatcacgtttcagtggcagtggatctgggacagatttcactctcaccatcagcagtctgcaacctgaagattttgctacgtactactgtcaacagtatcatgattttcctcttacgttcggccaagggaccaaggtggaaatcaaacgg

SEQ ID NO: 563 - DNA, 324 bp, Homo sapiens
gacatccagatgacccagtctccatcctccctgtctgcatctgtaggagaccgtgtcaccatcacttgccgggcaagtcagaatattgatcgtgagttacgttggtaccagcagaaaccaggggaagcccctatgttcctgatctatcatgcgtccaggttgcaaagtggagtcccatcacgtttcagtggcagtggatctgggacagatttcactctcaccatcagcagtctgcaacctgaagattttgctacgtactactgtcaacagtatcatgattttcctcttacgttcggccaagggaccaaggtggaaatcaaacgg

SEQ ID NO: 564 - DNA, 324 bp, Homo sapiens
gacatccagatgacccagtctccatcctccctgtctgcatctgtaggagaccgtgtcaccatcacttgccgggcaagtcagaatattgatcgtgagttacgttggtaccagcagaaaccagggaaagcccctatgttcctgatctatcatgcgtccaggttgcaacgtggggtcccatcacgtttcagtggcagtggatctgggacagatttcactctcaccatcagcagtctgcaacctgaagattttgctacgtactactgtcaacagtatcatgattttcctcttacgttcggccaagggaccaaggtggaaaacaaacgg

SEQ ID NO: 565 - DNA, 324 bp, Homo sapiens
gagatcaagatgacccagtctccatcctccctgtctgcatctgtaggagaccgtgtcaccatcacttgccgggcaagtaagaatattgatcgtgagttacgttggtaccagcagaaaccagggaaagcccctatgttcctgatctatcatgcgtccaggttgctgaagggggtcccatcacgtttcagtggcagtggatctgggacagatttcactctcaccatcagcagtctgcaacctgaagattttgctacatactactgtcaacagtatcatgattttcctcttacgttcggccaagggaccaaggtggaaatcaaacgg

SEQ ID NO: 566 - DNA, 324 bp, Homo sapiens
ccgatcgtgatgacccagtctccatcctccctgtctgcatctgtaggagaccgtgtcaccatcacttgccgggcaagtagtagtattgatcgtgagttacgttggtaccagcagaaaccagggaaagcccctatgttcctgatctatcatgcgtccaggttgatgaagggggtcccatcacgtttcagtggcagtggatctgggacagatttcactctcaccatcagcagtctgcaacctgaagattttgctacgtactactgtcaacagtatcatgattttcctcttacgttcggccaagggaccaaggtggaaatcaaacgg

SEQ ID NO: 567 - DNA, 324 bp, Homo sapiens
gacatccagatgacccagtctccatcctccctgtctgcatctgtaggagaccgtgtcaccatcacttgccgggcaagtaataatattgatcgtgagttacgttggtaccagcagaaaccagggaaagcccctatgttcctgatctatcatgcgtccaggttgatgaagggtgtcccatcacgtttcagtggcagtggatctgggacagatttcactctcaccatcagcagtctgcaacctgaagattttgctacgtactactgtcaacagtatcatgattttcctcttacgttcggccaagggaccaaggtggaaatcaaacgg

SEQ ID NO: 568 - DNA, 324 bp, Homo sapiens
gacatccagatgactcagtctccatcctctctgtctgcatctgtaggagaccgtgtcaccatcacttgccgggcaagtcagaatattgatcgtgagttacgttggtaccagcagaaaccagggaaagcccctatgttcctgatctatcatgcgtccaggttgctacgtggggtcccatcacgtttcagtggcagtggatctgggacagatttcactctcaccatcagcagtctgcaacctgaagattttgctacgtactactgtcaacagtatcatgattttcctcttacgttcggccaagggaccaaggtggaaatcaaacgg

SEQ ID NO: 569 - DNA, 324 bp, Homo sapiens
gacatccagatgacccagtctccatcctccctgtctgcatctgtaggagaccgtgtcaccatcacttgccgggcaagtcagaatattgatcgtgagttacgttggtaccagcagaaaccagggaaagcccctatgttcctgatctatcatgcgtccaggttgcgacgtggggtcccatcacgtttcagtggcagtggatctgggacagatttcactctcaccatcagcagtctgcaacctgaagattttgctacgtactactgtcaacagtatcatgatttccctcttacgttcggccaagggaccaaggtggaaatcaaacgg

SEQ ID NO: 570 - DNA, 324 bp, Homo sapiens
gacatccagatgacccagtctccatcctccctgtctgcatctgtaggagaccgtgtcaccatcacttgccgggcaagtcagaatattgatcgtgagttacgttggtaccagcagaaaccagggaaagcccctatgttcctgatctatcatgcgtccaggttgcaacgtggggtcccatcacgtttcagtggcagtggatctgggacagatttcactctcaccatcagcagtctgcaacctgaggattttgctacgtactactgtcaacagtatcatgattttcctcttacgatcggccaagggaccaaggtggaaatcaaacgg

SEQ ID NO: 571 - DNA, 324 bp, Homo sapiens
gacatccagatgacccagtctccatcctccctgtctgcatctgtaggagaccgtgtcaccatcacttgccgggcaagtcagaatattgatcgtgagttacgttggtaccagcagaaaccagggaaagaccctatgttcctgatctatcatgcgtccaggttgcaacgtggggtcccatcacgtttcagtggcagtggatctgggacagatttcactctcaccatcagcagtctgcaacctgaagattttgctacgtactactgtcaacagtatcatgattttcctcttacgttcggccaagggaccaaggtggaaatcaaacgg

SEQ ID NO: 572 - DNA, 324 bp, Homo sapiens
aatatcgatatgacccagtctccatcctccctgtctgcatctgtaggagaccgtgtcaccatcacttgccgggcaagtcagaatattgatcgtgagttacgttggtaccagcagaaaccagggaaagcccctatgttcctgatctatcatgcgtccaggttgtataggggggtcccatcacgtttcagtggcagtggatctgggacagatttcactctcaccatcagcagtctgcaacctgaagattttgctacgtactactgtcaacagtatcatgattttcctcttacgttcggccaagggaccaaggtggaaatcaaacgg

SEQ ID NO: 573 - DNA, 324 bp, Homo sapiens
catatctctatgacccagtctccatcctccctgtctgcatctgtaggagaccgtgtcaccatcacttgccgggcaagtagtaatattgatcgtgagttacgttggtaccagcagaaaccagggaaagcccctatgttcctgatctatcatgcgtccaggttgattaagggggtcccatcacgtttcagtggcagtggatctgggacagatttcactctcaccatcagcagtctgcaacctgaagattttgctacgtactactgtcaacagtatcatgattttcctcttacgttcggccaagggaccaaggtggaaatcaaacgg

SEQ ID NO: 574 - DNA, 324 bp, Homo sapiens
gagatcaggatgacccagtctccatcctccctgtctgcatctgtaggagaccgtgtcaccatcacttgccgggcaagtaataatattgatcgtgagttacgttggtaccagcagaaaccagggaaagcccctatgttcctgatctatcatgcgtccaggttgtataagggggtcccatcacgtttcagtggcggtggatctgggacagatttcactctcaccatcagcagtctgcaacctgaagattttgctacgtactactgtcaacagtatcatgattttcctcttacgttcggccaagggaccaaggtggaaatcaaacgg

SEQ ID NO: 575 - DNA, 324 bp, Homo sapiens
aggatcgtgatgacccagtctccatcctccctgtctgcatctgtaggagaccgtgtcaccatcacttgccgggcaagtaataatattgatcgtgagttacgttggtaccaacagaaaccagggaaagcccctatgttcctgatctatcatgcgtccaggttgattaagggggtcccatcacgtttcagtggcagtggatctgggacagatttcactctcaccatcagcagtctgcaacctgaagattttgctacgtactactgtcaacagtatcatgattttcctcttacgttcggccaagggaccaaggtggaaatcaaacgg

SEQ ID NO: 576 - DNA, 324 bp, Homo sapiens
cctatccggatgacccagtctccatcctccctgtctgcatctgtaggagaccgtgtcaccatcacttgccgggcaagtgctaatattgatcgtgagttacgttggtaccagcagaaaccagggaaagcccctatgttcctgatctatcatgcgtccaggttgattaagggggtcccatcacgtttcagtggcagtggatctgggacagatttcactctcaccatcagcagtctgcaacctgaagattttgctacgtactactgtcaacagtatcatgattttcctcttacgttcggccaagggaccaaggtggaaatcaaacgg

SEQ ID NO: 577 - DNA, 324 bp, Homo sapiens
acgatctctatgacccagtctccatcctccctgtctgcatctgtaggagaccgtgtcaccatcacttgccgggcaagtagtaatattgatcgtgagttacgttggtaccagcagaaaccagggaaagcccctatgttcctgatctatcatgcgtccaggttgtataggggggccccatcacgtttcagtggcagtggatctgggacagatttcactctcaccatcagcagtctgcaacctgaagattttgctacgtactactgtcaacagtatcatgattttcctcttacgttcggccaagggaccaaggtggaaatcaaacgg

SEQ ID NO: 578 - DNA, 324 bp, Homo sapiens
cgtatccttatgacccagtctccatcctccctgtctgcatctgtaggagaccgtgtcaccatcacttgccgggcaagtcttaatattgatcgtgagttacgttggttccagcagaaaccagggaaagcccctatgttcctgatctatcatgcgtccaggttgcataagggggtcccatcacgtttcagtggcagtggatctgggacagatttcactctcaccatcagcagtctgcaacctgaagattttgctacgtactactgtcaacagtatcatgattttcctcttacgttcggccaagggaccaaggtggaaatcaaacgg

SEQ ID NO: 579 - DNA, 324 bp, Homo sapiens
gggatcgtgatgacccagtctccatcctccctgtctgcatctgtaggagaccgtgtcaccatcacttgccgggcaagtattaatattgatcgtgagttacgttggtaccagcagaaaccagggaaagcccctatgttcctgatctatcatgcgtccaggttgcataagggggccccatcacgtttcagtggcagtggatctgggacagatttcactctcaccatcagcagtctgcaacctgaagattttgctacgtactactgtcaacagtatcatgattttcctcttacgttcggccaagggaccaaggtggaaatcaaacgg

SEQ ID NO: 580 - DNA, 324 bp, Homo sapiens
agtatcgttatgacccagtctccatcctccctgtctgcatctgtaggagaccgtgtcaccatcacttgccgggcaagtcagaatattgatcgtgagttacgttggtaccagcagaaaccagggaaagcccctatgttcctgatctatcatgcgtccaggttgcataagggggtcccatcacgtttcagtggcagtggatctgggacagatttcactctcaccatcagcagtctgcaacctgaagattttgctacgtactactgtcaacagtatcatgattttcctcttacgttcggccaagggaccaaggtggaaatcaaacgg

SEQ ID NO: 581 - DNA, 324 bp, Homo sapiens
gatatcctgatgacccagtctccatcctccctgtctgcatctgtaggagaccgtgtcaccatcacttgccgggcaagtactaatattgatcgtgagttacgttggtaccagcagaaaccagggaaagcccctatgttcctgatctatcatgcgtccaggttgtataagggggtcccatcacgtttcagtggcagtggatctgggacagatttcactctcaccatcagcagtctgcaacctgaagattttgctacgtactactgtcaacagtatcatgattttcctcttacgttaggccaagggaccaaggtggaaatcaaacgg

SEQ ID NO: 582 - DNA, 324 bp, Homo sapiens
cagatcaatatgacccagtctccatcctccctgtctgcatctgtaggagaccgtgtcaccatcacttgccgggcaagtagtaatattgatcgtgagttacgttggtaccagcagaaaccagggaaagcccctatgttcctgatctatcatgcgtccaggttgattaagggggtcccatcacgtttcagtggcagtggatctgggacagatttcactctcaccatcagcagtctgcaacctgaagattttgctacgtactactgtcaacagtatcatgattttcctcttacgttcggccaagggaccaaggtggaaatcaaacgg

SEQ ID NO: 583 - DNA, 324 bp, Homo sapiens
acgatccagatgacccagtctccatcctccctgtctgcatctgtaggagaccgtgtcaccatcacttgccgggcaagtgagaatattgatcgtgagttacgttggtaccagcagaaaccagggaaagcccctatgttcctgatctatcatgcgtccaggttgattaagggggtcccatcacgtttcagtggcagtggatctgggacagatttcactctcaccatcagcagtctgcaacctgaagattttgctacgtactactgtcaacagtatcatgattttcctcttacgttcggccaagggaccaaggtggaaatcaaacgg

SEQ ID NO: 584 - DNA, 324 bp, Homo sapiens
cagatccttatgacccagtctccatcctccctgtctgcatctgtaggagaccgtgtcaccatcacttgccgggcaagtagtaatattgatcgtgagttacgttggtaccagcagaaaccagggaaagcccctatgttcctgatctatcatgcgtccaggttgatgaagggggtcccatcacgtttcagtggcagtggatctgggacagatttcactctcaccatcagcagtctgcaacctgaagattttgctacgtactactgtcaacagtatcatgattttcctcttacgttcggccaagggaccaaggtggaaatcaaacgg

SEQ ID NO: 585 - DNA, 324 bp, Homo sapiens
cagatcgttatgacccagtctccatcctccctgtctgcatctgtaggagaccgtgtcaccatcacttgccgggcaagtggtaatattgatcgtgagttacgttggtaccagcagaaaccagggaaagcccctatgttcctgatctatcatgcgtccaggttgtataagggggtcccatcacgtttcagtggcagtggatctgggacagatttcactctcaccatcagcagtctgcaacctgaagattttgctacgtactactgtcaacagtatcatgattttcctcttacgttcggccaagggaccaaggtggaaatcaaacgg

SEQ ID NO: 586 - DNA, 324 bp, Homo sapiens
gatatcttgatgacccagtctccatcctccctgtctgcatctgtaggagaccgtgtcaccatcacttgccgggcaagttctaatattgatcgtgagttacgttggtaccagcagaaaccagggaaagcccctatgttcctgatctatcatgcgtccaggttgatgaagggggtcccatcacgtttcagtggcagtggatctgggacagatttcactctcaccatcagcagtctgcaacctgaagattttgctacgtactactgtcaacagtatcatgattttcctcttacgttcggccaagggaccaaggtggaaatcaaacgg

SEQ ID NO: 587 - DNA, 324 bp, Homo sapiens
ggtatcgagatgacccagtctccatcctccctgtctgcatctgtaggagaccgtgtcaccatcacttgccgggcaagtaataatattgatcgtgagttacgttggtaccagcagaaaccagggaaagcccctatgttcctgatctatcatgcgtccaggttgcataggggggtcccatcacgtttcagtggcagtggatctgggacagatttcactctcaccatcagcagtctgcaacctgaagattttgctacgtactactgtcaacagtatcatgattttcctcttacgttcggccaagggaccaaggtggaaatcaaacgg

SEQ ID NO: 588 - DNA, 324 bp, Homo sapiens
gggatcgttatgacccagtctccatcctccctgtctgcatctgtaggagaccgtgtcaccatcacttgccgggcaagtaataatattgatcgtgagttacgttggtaccagcagaaaccagggaaagcccctatgttcctgatctatcatgcgtccaggttgtataagggagtcccatcacgtttcagtggcagtggatctgggacagatttcactctcaccatcagcagtctgcaacctgaagattttgctacgtactactgtcaacagtatcatgattttcctcttacgttcggccaagggaccaaggtggaaatcaaacgg

SEQ ID NO: 589 - DNA, 324 bp, Homo sapiens
ccgatcaagatgacccagtctccatcctccctgtctgcatctgtaggagaccgtgtcaccatcacttgccgggcaagtaggaatattgatcgtgagttacgttggtaccagcagaaaccagggaaagcccctatgttcctgatctatcatgcgtccaggttgatgcatggagtcccatcacgtttcagtggcagtggatctgggacagatttcactctcaccatcagcagtctgcaacctgaagattttgctacgtactactgtcaacagtatcatgattttcctcttacgttcggccaagggaccaaggtggaaatcaaacgg

SEQ ID NO: 590 - DNA, 324 bp, Homo sapiens
aatatcgttatgacccagtctccatcctccctgtctgcatctgtaggagaccgtgtcaccatcacttgccgggcaagtcagaatattgatcgtgagttacgttggtaccagcagaaaccagggaaagcccctatgttcctgatctatcatgcgtccaggttgtataagggggtcccatcacgtttcagtggcagtggatctgggacagatttcactctcaccatcagcagtctgcaacctgaagattttgctacgtactactgtcaacagtatcatgattttcctcttacgttcggccaagggaccaaggtggaaatcaaacgg

SEQ ID NO: 591 - DNA, 324 bp, Homo sapiens
gacatccagatgacccagtctccatcctccctgtctgcatctgtaggagaccgtgtcaccatcacttgccgggcaagtcaggatatttatctgaatttaaattggtatcagcagaaaccagggaaagcccctaagctcctgatctatggtacgtccaatttgcaaagtggggtcccatcacgtttcagtggcagtggatctgggacagatttcactctcaccatcagcagtctgcaacctgaagattttgctacgtactactgtcaaccgtcttttctttatccttatacgttcggccaagggaccaaggtggaaatcagacgg

SEQ ID NO: 592 - DNA, 324 bp, Homo sapiens
gacatccagatgacccagtctccatcctccctgtctgcatctgtaggagaccgtgtcaccatcacttgccgggcaagtcaggatatttatctgaatttaaattggtatcagcagaaaccagggaaagcccctaagctcctgatctatggtacgtccaatttgcaaagtggggtcccatcacgtttcagtggcagtggatctgggacagatttcactctcaccatcagcagtctgcaacctgaagattttgctacgtactactgtcaaccgtctttttacttcccttatacgttcggccaagggaccaaggtggaaatcagacgg

SEQ ID NO: 593 - DNA, 324 bp, Homo sapiens
gacatccagatgacccagtctccatcctccctgtctgcatctgtaggagaccgtgtcaccatcacttgccgggcaagtcaggatatttacctgaatttagactggtatcagcagaaaccaggaaaagcccctaagctcctgatctatggtacgtccaatttgcaaagtggggtcccatcacgtttcagtggcagtggatctgggacagatttcactctcaccatcagcagtctgcaacctgaagattttgctacgtactactgtcaaccgtcttttttcttcccttatacgttcggccaagggaccaaggtggaaatcagacgg

SEQ ID NO: 594 - DNA, 324 bp, Homo sapiens
gacatccagatgacccagtctccatcctccctgtctgcatctgtaggagaccgtgtcaccatcacttgccgggcaagtcaggatatttacctgaatttagactggtatcagcagaaaccagggaaagcccctaagctcctgatctatggtacgtccaatttgcaaagtggggtcccatcacgtttcagtggcagtggatctgggacagatttcactctcaccatcagcagtctgcaacctgaagatttcgctacgtactactgtcaaccgtctttttacttcccttatacgttcggccaagggaccaaggtggaaatcagacgg

SEQ ID NO: 595 - DNA, 324 bp, Homo sapiens
gacatccagatgacccagtctccatcctccctgtctgcatctgtaggagaccgtgtcaccatcacttgccgggcaagtcaggatatttacctgaatttagactggtatcagcagaaaccagggaaagcccctaagctcctgatctatggtacgtccaatttgcaaagtggggtcccatcacgtttcagtggcagtggatctgggacagatttcactctcaccatcagcagtctgcaacctgaagattttgctacgtactactgtcaaccgtcttttttccacccttatacgttcggccaagggaccaaggtggaaatcagacgg

SEQ ID NO: 596 - DNA, 324 bp, Homo sapiens
gacatccagatgacccagtctccatcctccctgtctgcatctgtaggagaccgtgtcaccatcacttgccgggcaagtcaggatattttcctgaatttagagtggtatcagcagaaaccagggaaagcccctaagctcctgatctatggtacgtccaatttgcaaagtggggtcccatcacgtttcagtggcagtggatctgggacagatttcactctcaccatcagcagtctgcaacctgaagattttgctacgtactactgtcaaccgtctttttacttcccttatacgttcggccaagggaccaaggtggaaatcagacgg

SEQ ID NO: 597 - DNA, 324 bp, Homo sapiens
gacatccagatgacccagtctccatcctccctgtctgcatctgtaggagaccgtgtcaccatcacttgccgggcaagtcaggatatttacctgaatttagactggtatcagcagaaaccagggaaagcccctaagctcctgatctatggtacgtccaatttgcaaagtggggtcccatcacgtttcagtggcagtggatctgggacagatttcactctcaccatcagcagtctgcaacctgaagattttgctacgtactactgtcaaccgtcttttctgttcccttatacgttcggccaagggaccaaggtggaaatcagacgg

SEQ ID NO: 598 - DNA, 324 bp, Homo sapiens
gacatccagatgacccagtctccatcctccctgtctgcatctgtaggagaccgtgtcaccatcacttgccgggcaagtcaggatatttacctgaatttagactggtatcagcagaaaccaggggaagcccctaagctcctgatctatggtacgtccaatttgcaaagtggggtcccatcacgtttcagtggcagtggatctgggacagatttcactctcaccatcagcagtctgcaacctgaagattttgctacgtactactgtcaaccgtcttttttgtacccttatacgttcggccaagggaccaaggtggaaatcagacgg

SEQ ID NO: 599 - DNA, 324 bp, Homo sapiens
gacatccagatgacccagtctccatcctccctgtctgcatctgtaggagaccgtgtcaccatcacttgccgggcaagtcaggatatttacctgaatttagactggtatcagcagaaaccagggaaagcccctaagctcctgatctatggtacgtccaatttgcaaagtggggtcccatcacgtttcagtggcagtggatctgggacagatttcactctcaccatcggcagtctgcaacctgaagattttgctacgtactactgtcaaccgtcttttttgtacccttatacgttcggccaagggaccaaggtggaaatcagacgg

SEQ ID NO: 600 - DNA, 324 bp, Homo sapiens
gacatccagatgacccagtctccatcctccctgtctgcatctgtaggagaccgtgtcaccatcacttgccgggcaagtcaggatatttacctgaatttagactggtatcagcagaaaccagggaaagcccctaggctcctgatctatggtacgtccaatttgcaaagtggggtcccatcacgtttcagtggcagtggatctgggacagatttcactctcaccatcagcagtctgcaacctgaagattttgctacgtactactgtcaaccgtcttttctctacccttatacgttcggccaagggaccaaggtggaaatcagacgg

SEQ ID NO: 601 - DNA, 324 bp, Homo sapiens
gacatccagatgacccagtctccaccctccctgtctgcatctgtaggagaccgcgtcaccatcacttgccgggcaagtcaggatatttacctgaatttaaactggtatcagcagaaaccagggaaagcccctaagctcctgatctatggtacgtccaatttgcaaagtggggtcccatcacgtttcagtggcagtggatctgggacagatttcactctcaccatcagcagtctgcaacctgaagattttgctacgtactactgtcagccgtctttttacttgccttatacgttcggccaagggaccaaggtggaaatcagacgg

SEQ ID NO: 602 - DNA, 324 bp, Homo sapiens
gacatccaggtgacccagtctccatcctccctgtctgcatctgtaggagaccgtgtcaccatcacttgccgggcaagtcaggatatttacctgaatttaaactggtatcagcagaaaccagggaaagcccctaagctcctgatctatggtacgtccaatttgcaaagtggggtcccatcacgtttcagtggcagtggatctgggacagatttcactctcaccatcagcagtctgcaacctgaagattttgctacgtactactgtcaaccgtctttttacttcccttatacgttcggccaagggaccaaggtggaaatcagacgg

SEQ ID NO: 603 - DNA, 324 bp, Homo sapiens
gacatccagatgacccagtctccatcctccctgtctgcatctgtaggagaccgtgtcaccatcacttgccgggcaagtcaggatatttacctgaatttaaactggtatcagcagaaaccagggaaagcccctaagctcctgatctatggtacgtccgatttgcaaagtggggtcccatcacgtttcagtggcagtggatctgggacagatttcactctcaccatcagcagtctgcaacctgaagattttgctacgtactactgtcaaccgtctttttggatgccttatacgttcggccaagggaccaaggtggaaatcagacgg

SEQ ID NO: 604 - DNA, 324 bp, Homo sapiens
gacatccagatgacccagtctccatcctccctgtctgcatctgtaggagaccgtgtcaccatcacttgccgggcaagtcaggatatttacctgaatttaaactggtatcagcagaaaccagggaaagcccctaagctcctgatctatggtacgtccaacttgcaaagtggggtcccatcacgtttcggtggcagtggatctgggacagatttcactctcaccatcagcagtctgcaacctgaagattttgctacgtactactgtcaaccgtctttttaccacccttatacgttcggccaagggaccaaggtggaaatcagacgg

SEQ ID NO: 605 - DNA, 324 bp, Homo sapiens
gacatccagatgacccagtctccatcctccctgtctgcatctgtaggagaccgtgtcaccatcacttgccgggcaagtcaggatatttacctgaatttagactggtatcagcagaaaccagggaaagcccctaagctcctgatctatggtacgtccaatttgcaaagtggggtcccatcacgtttcagtggcagtggatctgggacagatttcactctcaccatcagcagtctgcaacctgaagattttgctacgtactactgtcagccgtctttttactacccttatacgttcggccaagggaccaaggtggaaatcagacgg

SEQ ID NO: 606 - DNA, 324 bp, Homo sapiens
gacatccagatgacccagtctccatcctccctgtctgcatctgtaggagaccgtgtcaccatcacttgccgggcaagtcaggatatttggctgaatttagactggtatcagcagaaaccaggggaagcccctaagctcctgatctatggtacgtccaatttgcaaagtggggtcccatcacgtttcagtggcagtggatctgggacagatttcactctcaccatcagcagtctgcaacctgaagattttgctacgtactactgtcaaccgtctttttacttcccttatacgttcggccaagggaccaaggtggaaatcagacgg

SEQ ID NO: 607 - DNA, 324 bp, Homo sapiens
gacatccagatgacccagtctccatcctccctgtctgcatctgtaggagaccgtgtcaccatcacttgccgggcaagtcaggatatttacctgaatttagactggtatcagcagaaaccaggggaagcccctaagctcctgatctatggtacgtccaatttgcaaagtggggtcccatcacgtttcagtggcagtggatctgggacagatttcactctcaccatcagcagtctgcaacctgaagatcttgctacgtactactgtcaaccgtctttttacttcccttatacgttcggccaagggaccaaggtggaaatcagacgg

SEQ ID NO: 608 - DNA, 324 bp, Homo sapiens
gacatccagatgacccagtctccatcctccctgtctgcatctgtaggagaccgtgtcaccatcacttgccgggcaagtcaggatatttatctgaatttaaattggtatcagcagaaaccagggaaagcccctaagctcctgatctatggtacgtccaatttgcaaagtggggtcccatcacgtttcagtggcagtggatatgggacagatttcactctcaccatcagcagtctgcaacctgaggattttgctacgtactactgtcaaccgtcttttctttatccttatacgttcggccaagggaccaaggtggaaatcagacgg

SEQ ID NO: 609 - DNA, 324 bp, Homo sapiens
gacatccagatgacccagtctccatcctccctgtctgcatctgtaggagaccgtgtcaccatcacttgcctggcaagtcaggatatttatctgaatttaaattggtatcagcagaaaccagggaaagcccctaagctcctgatctatggtacgtccaatttgcaaagtggggtcccatcacgtttcagtggcagtggatatgggacagatttcactcttaccatcagcagtctgcaacctgaagattttgctacgtactactgtcaaccgtcttttctttatccttatacgttcggccaagggaccaaggtggaaatcagacgg

SEQ ID NO: 610 - DNA, 324 bp, Homo sapiens
gacatccagatgacccagtctccatcctccctgtctgcatctgtaggagaccgtgtcaccatcacttgccgggcaagtcaggatatttatctgaatttaaattggtatcagcagaaaccagggaaagcccctaagctcctgatctatggtacgtccgatttgcaaagtggggtcccatcacgtttcagtggcagtggatctgggacagatttcactctcaccatcagcagtctgcaacctgaagattttgctacgtactactgtcaaccgtcttttctttatccttatacgttcggccaagggaccaaggtggaaatcagacgg

SEQ ID NO: 611 - DNA, 324 bp, Homo sapiens
gacatccagatgacccagtctccatcctccctgtctgcatctgtaggagaccgtgtcaccatcacttgccgggcaagtcaggatatttggctgaatttagactggtatcagcagaaaccagggaaagcccctaagctcctgatctatggtacgtccgatttgcaaagtggggtcccatcacgtttcagcggcagtggatctgggacagatttcactctcaccatcagcagtctgcaacctgaagattttgctacgtactactgtcaaccgtcttttatgttcccttatacgttcggccaagggaccaaggtggaaatcagacgg

SEQ ID NO: 612 - DNA, 324 bp, Homo sapiens
gacatccagatgacccagtctccatcctccctgtctgcatctgtaggagaccgtgtcaccatcacttgccgggcaagtcaggatatttatctgaatttaaattggtatcagcagaaaccagggaaagcccctaagctcctgatctatggtacgtccaatttgcaaagtggggtcccatcacgtttcagtggcagtggatatgggacagatttcactctcaccatcagcagtctgcaacctgaagattttgctacgtactactgtcaaccgtcttttctttatccttatacgttcggccaagggaccaaggtggaaaacagacgg

SEQ ID NO: 613 - DNA, 324 bp, Homo sapiens
gacatccagatgacccagtctccatcctccctgtctgcatctgtaggagaccgtgtcatcatcacttgccgggcaagtcaggatatttacctgaatttaaactggtatcagcagaaaccagggaaagcccctaagctcctgatctatggtacgtccaatttgcaaagtggggtcccatcacgtttcagtggcagtggatctgggacagatttcactctcaccatcagcagtctgcaacctgaagattttgctacgtactactgtcaaccgtcttttgtcttcccttatacgttcggccaagggaccaaggtggaaatcagacgg

SEQ ID NO: 614 - DNA, 324 bp, Homo sapiens
gacatccagatgacccagtctccatcctccctgtctgcatctgtaggagaccgtgtcaccatcacttgccgggcaagtcaggatatttacctgaatttagactggtatcagcagaaaccaggggaagcccctaagctcctgatctatggtacgtccaatttgcaaagtggggtcccatcacgtttcagtggcagtggatctgggacagatttcactctcaccatcagcagtctgcaacctgaagattttgctacgtactactgtcaaccgtcttttttgttcccttatacgttcggccaagggaccaaggtggaaatcagacgg

SEQ ID NO: 615 - DNA, 324 bp, Homo sapiens
gacatccagatgacccagtctccatcctccctgtctgcatctgtaggagaccgtgtcaccatcacttgccgggcaagtcaggatatttatctgaatttaaattggtatcagcagaaaccagggaaagcccctaagctcctgatctatggtacgtccaatttgcaaagtggggtcccatcacgtttcagtggcagtggatatgggacaaatttcactctcaccatcagcagtctgcaacctgaagattttgctacgtactactgtcaaccgtcttttctttatccttatacgttcggccaagggaccaaggtggaaatcagacgg

SEQ ID NO: 616 - DNA, 324 bp, Homo sapiens
gacatccagatgacccagtctccatcctccctgtctgcatctgtaggagaccgtgtcaccatcacttgccgggcaagtcaggatatttacctgaatttaaactggtatcagcagaaaccagagaaagcccctaagctcctgatctatggtacgtccaatttgcaaagtggggtcccatcacgtttcagtggcagtggatctgggacagatttcactctcaccatcagcagtctgcaacctgaagattttgctacgtactactgtcaaccgtcttttctgtacccttatacgttcggccaagggaccaaggtggaaatcagacgg

SEQ ID NO: 617 - DNA, 324 bp, Homo sapiens
gacatccagatgacccagtctccatcctccctgtctgcatctgtaggagaccgtgtcaccatcacttgccgggcaagtcaggatatttatctgaatttaaattggtatcagcagaaaccagggacagcccctaagctcctgatctatggtacgtccaatttgcaaagtggggtcccatcacgtttcagtggcagtggatctgggacagatttcactctcaccatcagcagtctgcaacctgaagattttgctacgtactactgtcaaccgtcttttctttatccttatacgttcggccaagggaccaaggtggaaatcagacgg

SEQ ID NO: 618 - DNA, 324 bp, Homo sapiens
gacatccagatgacccagtctccatcctccctgtttgcatctgtaggagaccgtgtcaccatcacttgccgggcaagtcaggatatttatctgaatttaaattggtatcagcagaaaccagggaaagcccctaagctcctgatccatggtacgtccaatttgcaaagtggggtcccatcacgtttcagtggcagcggatctgggacagatttcactctcaccatcagcagtctgcaacctgaagattttgctacgtactactgtcaaccgtcttttctttatccttatacgttcggccaagggaccaaggtggaaatcaggcgg

SEQ ID NO: 619 - DNA, 324 bp, Homo sapiens
gacatccagatgacccagtctccatcctccctgtctgcatctgtaggagaccgtgtcaccatcacttgccgggcaagtcaggatatttatctgaatttaaattggtatcagcagaaaccagggaaagcccctaagctcctgatctatggtacgtccaacttgcaaagtggggtcccatcacgtttcagtggcagtggatctggggcagatttcactctcaccatcagcagtctgcaacctgaagattttgctacgtactactgtcaaccgtcttttctttatccttatacgttcggccaagggaccaaggtggaaatcagacgg

SEQ ID NO: 620 - DNA, 324 bp, Homo sapiens
gacatccagatgacccagtctccatcctccctgtctgcatctgtaggagaccgtgtcaccatcacttgccgggcaagtcaggatatttacctgaatttagactggtatcagcagaaaccagggaaagcccctaagctcctgatctatggttcgtcctatttgcaaagtggggtcccatcacgtttcagtggcagtggatctgggacagatttcactctcaccatcagcagtctgcaacctgaagatttcgctacgtactactgtcaaccgtctttttacttcccttatacgttcggccaagggaccaaggtggaaatcagacgg

SEQ ID NO: 621 - DNA, 324 bp, Homo sapiens
gacatccagatgacccagtctccatcctccctgtctgcatctgtaggagaccgtgtcaccatcacttgccgggcaagtcaggatatttacctgaatttagactggtaccagcagaaaccagggaaagcccctaagctcctgatccgtggtgtttccgagttgcaaagtggggtcccatcacgtttcagtggcagtggatctgggacagagttcactctcaccatcagcagtctgcaacctgaagatttcgctacgtactactgtcaaccgtctttttacttcccttatacgttcggccaagggaccaaggtggaaatcagacgg

SEQ ID NO: 622 - DNA, 324 bp, Homo sapiens
gacatccagatgacccagtctccatcctccctgtctgcatctgtaggagaccgtgtcaccatcacttgccgggcaagtcaggatatttacctgaatttagactggtaccagcagaaaccagggaaagcccctaagctcctgatctctttggcttccgagttgcaaagtggggtcccatcacgtttcagtggcagtggatctgggacagatttcactctcaccatcagcagtctgcaacctgaagatttcgctacgtactactgtcaaccgtctttttacttcccttatacgttcggccaagggaccaaggtggaaatcagacgg

SEQ ID NO: 623 - DNA, 324 bp, Homo sapiens
gacatccagatgacccagtctccatcctccctgtctgcatctgtaggagaccgtgtcaccatcacttgccgggcaagtcaggatatttacctgaatttagactggtaccagcagaaaccagggaaagcccctaagctcctgatcggtcttacttccgatttgcaaagtggggtcccatcacgtttcagtggcagtggatctgggacagatttcactctcaccatcagcagtctgcaacctgaagatttcgctacgtactactgtcaaccgtctttttacttcccttatacgttcggccaagggaccaaggtggaaatcagacgg

SEQ ID NO: 624 - DNA, 324 bp, Homo sapiens
gacatccagatgacccagtctccatcctccctgtctgcatctgtaggagaccgtgtcaccatcacttgccgggcaagtcaggatatttacctgaatttagactggtatcagcagaaaccagggaaagcccctaagctcctgatctatggtacgtccaatttgcaaagtggggtcccatcacgtttcagtggcagtggatatgggacagatttcactctcaccatcagcagtctgcaacctgaagatttcgctacgtactactgtcaaccgtctttttacttcccttatacgttcggccaagggaccaagctggaaatcagacgg

SEQ ID NO: 625 - DNA, 324 bp, Homo sapiens
gacatccagatgacccaggctccatcctccctgtctgcatctgtaggagaccgtgtcaccatcacttgccgggcaagtcaggatatttacctgaatttagactggtatcagcagacaccagggaatgcccctaagctcctgatctatggtacgtccaatttgcaaagtggggtcccatcacgtttcagtggcagtggatctgggacagatttcactctcaccatcagcagtctgcaacctgaagatttcgctacgtactactgtcaaccgtctttttacttcccttatacgttcggccaagggaccaaggtggaaatcagacgg

SEQ ID NO: 626 - DNA, 324 bp, Homo sapiens
gacatccagatgacccagtctccatcctccctgtctgcatctgtaggagaccgtgtcaccatcacttgccgggcaagtcaggttatttacctgaatttagactggtatcagcagaaaccagggaaagcccctaggctcctgatctatggtacgtccaatttgcaaagtggggtcccatcacgtttcagtggcagtggatctgggacagatttcactctcaccatcagcagtctgcaacctgaagatttcgctacgtactactgtcaaccgtctttttacttcccttatacgttcggccaagggaccaaggtggaaatcagacgg

SEQ ID NO: 627 - DNA, 324 bp, Homo sapiens
gacatccagatgacccagtctccatcctccctgtctgcatctgtaggagaccgtgtcaccatcacttgccgggcaagtcaggatatttacctgaatttagactggtaccagcagaaaccagggaaagcccctaagctcctgatcaggacgtcgtccgatttgcaaagtggggtcccatcacgtttcagtggcagtggatctgggacagatttcactctcaccatcagcagtctgcaacctgaagatttcgctacgtactactgtcaaccgtctttttacttcccttatacgttcggccaagggaccaaggtggaaatcagacgg

SEQ ID NO: 628 - DNA, 324 bp, Homo sapiens
gacatccagatgacccagtctccatcctccctgtctgcatctgtaggagaccgtgtcaccatcacttgccgggcaagtcaggatatttacctgaatttagactggtatcagcagaaaccagggaaagcccctaagctcctgatcactgtgggttccgagttgcaaagtggggtcccatcacgtttcagtggcagtggatctgggacagatttcactctcaccatcagcagtctgcaacctgaagatttcgctacgtactactgtcaaccgtctttttacttcccttatacgttcggccaagggaccaaggtggaaatcagacgg

SEQ ID NO: 629 - DNA, 324 bp, Homo sapiens
gacatccagatgacccagtctccatcctccctgtctgcatctgtaggagaccgtgtcaccatcacttgccgggcaagtcaggatatttacctgaatttagactggtaccagcagaaaccagggaaagcccctaagctcctgatcgctttggtttccgagttgcaaagtggggtcccatcacgtttcagtggcagtggatctgggacagatttcactctcaccatcagcagtctgcaacctgaagatttcgctacgtactactgtcaaccgtctttttacttcccttatacgttcggccaagggaccaaggtggaaatcagacgg

SEQ ID NO: 630 - DNA, 324 bp, Homo sapiens
gacatccagatgacccagtctccatcctccctgtctgcatctgtaggagaccgtgtcaccatcacttgccgggcaagtcaggatatttacctgaatttagactggtaccagcagaaaccagggaaagcccctaagctcctgatccatcattgttccgagttgcaaagtggggtcccatcacgtttcagtggcagtggatctgggacagatttcactctcaccatcagcagtctgcaacctgaagatttcgctacgtactactgtcaaccgtctttttacttcccttatacgttcggccaagggaccaaggtggaaatcagacgg

SEQ ID NO: 631 - DNA, 324 bp, Homo sapiens
gacatccagatgacccagtctccatcctccctgtctgcatctgtaggagaccgtgtcaccatcacttgccgggcaagtcaggatatttacctgaatttagactggtaccagcagaaaccagggaaagcctctaagctcctgatctcgagtagttccgatttgcaaagtggggtcccatcacgtttcagtggcagtggatctgggacagatttcactctcaccatcagcagtctgcaacctgaagatttcgctacgtactactgtcaaccgtctttttacttcccttatacgttcggccaagggaccaaggtggaaatcagacgg

SEQ ID NO: 632 - DNA, 324 bp, Homo sapiens
gacatccagatgacccagtctccatcctccctgtctgcatctgtaggagaccgtgtcaccatcacttgccgggcaagtcaggatatttacctgaatttagactggtaccagcagaaaccagggaaagcccctaagctcctgatctctttggtttccgatttgcaaagtggggtcccatcacgtttcagtggcagtggatctgggacagatttcactctcaccatcagcagtctgcaacctgaagatttcgctacgtactactgtcaaccgtctttttacttcccttatacgttcggccaagggaccaaggtggaaatcagacgg

SEQ ID NO: 633 - DNA, 324 bp, Homo sapiens
gacatccagatgacccagtctccaccctccctgtctgcatctgtaggagaccgtgtcaccatcacttgccgggcaagtcaggatatttacctgaatttagactggtatcagcagaaaccagggaaagcccctaagctcctgatctctctttcgtccgatttgcaaagtggggtcccatcacgtttcagtggcagtggatctgggacagatttcactctcaccatcagcagtctgcaacctgaagatttcgctacgtactactgtcaaccgtctttttacttcccttatgcgttcggccaagggaccaaggtggaaatcagacgg

SEQ ID NO: 634 - DNA, 324 bp, Homo sapiens
gacatccagatgacccagtctccatcctccctgtctgcatctgtaggagaccgtgtcaccatcacttgccgggcaagtcaggatatttacctgaatttagactggtatcagcagaaaccagggaaagcccctaagctcctgatcctttattcgtccgagttgcaaagtggggtcccatcacgtttcagtggcagtggatctgggacagatttcactctcaccatcagcagtctgcaacctgaagatttcgctacgtactactgtcaaccgtctttttacttcccttatacgttcggccaagggaccaaggtggaaatcagacgg

SEQ ID NO: 635 - DNA, 324 bp, Homo sapiens
gacatccagatgacccagtctccatcctccctgtctgcatctgtaggagaccgtgtcaccatcacttgccgggcaagtcaggatatttacctgaatttagactggtaccagcagaaaccagggaaagcccctaagctcctgatctcgtggtcttcctttttgcaaagtggggtcccatcacgtttcagtggcagtggatctgggacagatttcactctcaccatcagcagtctgcaacctgaagatttcgctacgtactactgtcaaccgtctttttacttcccttatacgttcggccaagggaccaaggtggaaatcagacgg

SEQ ID NO: 636 - DNA, 324 bp, Homo sapiens
gacatccagatgacccagtctccatcctccctgtctgcatctgtaggagaccgtgtcaccatcacttgccgggcaagtcaggatatttacctgaatttagactggtatcagcagaaaccaggggaagcccctaagctcctgatctatggtacgtccgatttgcaaagtggggtcccatcacgtttcagtggcagtggatctgggacagatttcactctcaccatcagcagtctgcaacctgaagatttcgctacgtactactgtcaaccgtctttttacttcccttatacgttcggccaagggaccaaggtggaaatcagacgg

SEQ ID NO: 637 - DNA, 324 bp, Homo sapiens
gacatccagatgacccagtctccatcctccctgtctgcatctgtaggagaccgtgtcaccatcacttgccgggcaagtcaggatatttacctgaatttagactggtatcagcagaaaccagggaaagcccctaagctcctgatctatggtacgtccgatttgcaaagtggggtcccatcacgtttcagtggcagtggatatgggacagatttcactctcaccatcagcagtctgcaacctgaagatttcgctacgtactactgtcaaccgtctttttacttcccttatacgttcggccaagggaccaaggtggaaatcagacgg

SEQ ID NO: 638 - DNA, 324 bp, Homo sapiens
gacatccagatgacccagtctccatcctccctgtctgcatctgtaggagaccgtgtcaccatcacttgccgggcaagtcaggatatttacctgaatttagactggtatcagcagaaaccaggggaagcccctaagctcctgatcaattttggttccgagttgcaaagtggtgtcccatcacgtttcagtggcagtggatctgggacagatttcactctcaccatcagcagtctgcaacctgaagatttcgctacgtactactgtcaaccgtctttttacttcccttatacgttcggccaagggaccaaggtggaaatcagacgg

SEQ ID NO: 639 - DNA, 324 bp, Homo sapiens
gacatccagatgacccagtctccatcctccctgtctgcatctgtaggagaccgtgtcaccatcacttgccgggcaagtcaggatatttacctgaatttagactggtatcagcagaaaccagggaaagcccctaagctcctgatctactttggttccgagttgcaaagtggtgtcccatcacgtttcagtggcagtggatctgggacagatttcactctcaccatcagcagtctgcaacctgaagatttcgctacgtactactgtcaaccgtctttttacttcccttatacgttcggccaagggaccaaggtggaaatcagacgg

SEQ ID NO: 640 - DNA, 324 bp, Homo sapiens; identical to SEQ ID NO: 356

SEQ ID NO: 641 - DNA, 324 bp, Homo sapiens
gacatccagatgacccagtctccatcctccctgtctgcatctgtaggagaccgtgtcaccatcacttgccgggcaagtcagctgatttacctgaatttagactggtatcagcagaaaccagggaaagcccctaagctcctgatcaattttggttccgagttgcaaagtggtgtcccatcacgtttcagtggcagtggatatgggacagatttcactctcaccatcagcagtctgcaacctgaagatttcgctacgtactactgtcaaccgtctttttacttcccttatacgttcggccaagggaccaaggtggaaatcaaacgg

SEQ ID NO: 642 - DNA, 324 bp, Homo sapiens
gacatccagatgacccagtctccatcctccctgtctgcatctgtaggagaccgtgtcaccatcacttgccgggcaagtcagcggatttacctgaatttagactggtaccagcagaaaccagggaaagcccctaagctcctgatcaattttggttccgagttgcaaagtggtgtcccatcacgtttcagtggcagtggatatgggacagatttcactctcaccatcagcagtctgcaacctgaagatttcgctacgtactactgtcaaccgtctttttacttcccttatacgttcggccaagggaccaaggtggaaatcaaacgg

SEQ ID NO: 643 - DNA, 324 bp, Homo sapiens
gacatccagatgacccagtctccatcctccctgtctgcatctgtaggagaccgtgtcaccatcacttgccgggcaagtcaggcgatttacctgaatttagactggtatcagcagaaaccagggaaagcccctaagctcctgatcaattttggttccgagttgcaaagtggtgtcccatcacgtttcagtggcagtggatatgggacagatttcactctcaccatcagcagtctgcaacctgaagatttcgctacgtactactgtcaaccgtctttttacttcccttatacgttcggccaagggaccaaggtggaaatcaaacgg

SEQ ID NO: 644 - DNA, 324 bp, Homo sapiens
gacatccagatgacccagtctccatcctccctgtctgcatctgtaggagaccgtgtcaccatcacttgccgggcaagtcagcagatttacctgaatttagactggtaccagcagaaaccagggaaagcccctaagctcctgatcaattttggttccgagttgcaaagtggtgtcccatcacgtttcagtggcagtggatatgggacagatttcactctcaccatcagcagtctgcaacctgaagatttcgctacgtactactgtcaaccgtctttttacttcccttatacgttcggccaagggaccaaggtggaaatcaaacgg

SEQ ID NO: 645 - DNA, 324 bp, Homo sapiens
gacatccagatgacccagtctccatcctccctgtctgcatctgtaggagaccgtgtcaccatcacttgccgggcaagtcagacgatttacctgaatttagactggtatcagcagaaaccagggaaagcccctaagctcctgatcaattttggttccgagttgcaaagtggtgtcccatcacgtttcagtggcagtggatatgggacagatttcactctcaccatcagcagtctgcaacctgaagatttcgctacgtactactgtcaaccgtctttttacttcccttatacgttcggccaagggaccaaggtggaaatcaaacgg

SEQ ID NO: 646 - DNA, 324 bp, Homo sapiens
gacatccagatgacccagtctccatcctccctgtctgcatctgtaggagaccgtgtcaccatcacttgccgggcaagtcagagtatttacctgaatttagactggtatcagcagaaaccagggaaagcccctacgctcctgatcaattttggttccgagttgcaaagtggtgtcccatcacgtttcagtggcagtggatatgggacagatttcactctcaccatcagcagtctgcaacctgaagatttcgctacgtactactgtcaaccgtctttttacttcccttatacgttcggccaagggaccaaggtggaaatcaaacgg

SEQ ID NO: 647 - DNA, 324 bp, Homo sapiens
gacatccagatgacccagtctccatcctccctgtctgcatctgtaggagaccgtgtcaccatcacttgccgggcaagtcaggatatttacctgaatttagactggtatcagcagaaaccagggaaagcccctaagctcctgatcaattttggttccgagttgcaaagtggtgtcccatcacgtttcagtggcagtggatatgggacagatttcactctcaccatcagcagtctgcaacctgaagatttcgctacgtactactgtcaaccggctttttacttcccttatacgttcggccaagggaccaaggtggaaatcaaacgg

SEQ ID NO: 648 - DNA, 324 bp, Homo sapiens
gacatccagatgacccagtctccatcctccctgtctgcatctgtaggagaccgtgtcaccatcacttgccgggcaagtcaggatatttacctgaatttagactggtatcagcagaaaccagggaaagcccctaagctcctgatcaattttggttccgagttgcaaagtggtgtcccatcacgtttcagtggcagtggatatgggacagatttcactctcaccatcagcagtctgcaacctgaagattttgctacgtactactgtcaaccggggttttacttcccttatacgttcggccaagggaccaaggtggaaatcaaacgg

SEQ ID NO: 649 - DNA, 324 bp, Homo sapiens
gacatccagatgacccagtctccatcctccctgtctgcatctgtaggagaccgtgtcaccatcacttgccgggcaagtcaggatatttacctgaatttagactggtatcagcagaaaccagggaaagcccctaagctcctgatcaattttggttccgagttgcaaagtggtgtcccatcacgtttcagtggcagtggatatgggacagatttcactctcaccatcagcagtctgcaacctgaagatttcgctacgtactactgtcaaccgtcttattacttcccttatacgttcggccaagggaccaaggtggaaatcaaacgg

SEQ ID NO: 650 - DNA, 324 bp, Homo sapiens
gacatccagatgacccagtctccatcctccctgtctgcatctgtaggagaccgtgtcaccatcacttgccgggcaagtcaggatatttacctgaatttagactggtatcagcagaaaccagggaaagcccctaagctcctgatcaattttggttccgagttgcaaagtggtgtcccatcacgtttcagtggcagtggatatgggacagatttcactctcaccatcagcagtctgcaacctgaagattttgctacgtactactgtcaaccttctgggtactttccttatacgttcggccaagggaccaaggtggaaatcaaacgg

SEQ ID NO: 651 - DNA, 324 bp, Homo sapiens
gacatccagatgacccagtctccatcctccctgtctgcatctgtaggagaccgtgtcaccatcacttgccgggcaagtcaggatatttacctgaatttagactggtatcagcagaaaccagggaaagcccctaagctcctgatcaattttggttccgagttgcaaagtggtgtcccatcacgtttcagtggcagtggatatgggacagatttcactctcaccatcagcagtctgcaacctgaagattttgctacgtactactgtcaaccgtcttttgctttcccttatacgttcggccaagggaccaaggtggaaatcaaacgg

SEQ ID NO: 652 - DNA, 324 bp, Homo sapiens
gacatccagatgacccagtctccatcctccctgtctgcatctgtaggagaccgtgtcaccatcacttgccgggcaagtcaggatatttacctgaatttagactggtatcagcagaaaccagggaaagcccctaagctcctgatcaattttggttccgagttgcaaagtggtgtcccatcacgtttcagtggcagtggatatgggacagatttcactctcaccatcagcagtctgcaacctgaagattttgctacgtactactgtcaaccgtcttttctgttcccttatacgttcggccaagggaccaaggtggaaatcaaacgg

SEQ ID NO: 653 - DNA, 324 bp, Homo sapiens
gacatccagatgacccagtctccatcctccctgtctgcatctgtaggagaccgtgtcaccatcacttgccgggcaagtcaggatatttacctgaatttagactggtatcagcagaaaccagggaaagcccctaagctcctgatcaattttggttccgagttgcaaagtggtgtcccatcacgtttcagtggcagtggatatgggacagatttcactctcaccatcagcagtctgcaacctgaagattttgctacgtactactgtcaaccgtctttttaccatccttatacgttcggccaagggaccaaggtggaaatcaaacgg

SEQ ID NO: 654 - DNA, 324 bp, Homo sapiens
gacatccagatgacccagtctccatcctccctgtctgcatctgtaggagaccgtgtcaccatcacttgccgggcaagtcaggatatttacctgaatttagactggtatcagcagaaaccagggaaagcccctaagctcctgatcaattttggttccgagttgcaaagtggtgtcccatcacgtttcagtggcagtggatatgggacagatttcactctcaccatcagcagtctgcaacctgaagattttgctacgtactactgtcaaccgtctttttactggccttatacgttcggccaagggaccaaggtggaaatcaaacgg

SEQ ID NO: 655 - DNA, 324 bp, Homo sapiens
gacatccagatgacccagtctccatcctccctgtctgcatctgtaggagaccgtgtcaccatcacttgccgggcaagtcaggatatttacctgaatttagactggtatcagcagaaaccagggaaagcccctaagctcctgatcaattttggttccgagttgcaaagtggtgtcccatcacgtttcagtggcagtggatatgggacagatttcactctcaccatcagcagtctgcaacctgaagattttgctacgtactactgtcaaccgtctttttacttccctcctacgttcggccaagggaccaaggtggaaatcaaacgg

SEQ ID NO: 656 - DNA, 324 bp, Homo sapiens
gacatccagatgacccagtctccatcctccctgtctgcatctgtaggagaccgtgtcaccatcacttgccgggcaagtcaggatatttacctgaatttagactggtatcagcagaaaccagggaaagcccctaagctcctgatcaattttggttccgagttgcaaagtggtgtcccatcacgtttcagtggcagtggatgggggacagatttcactctcaccatcagcagtctgcaacctgaagatttcgctacgtactactgtcaaccgtctttttacttcccttatacgttcggccaagggaccaaggtggaaatcaaacgg

SEQ ID NO: 657 - DNA, 324 bp, Homo sapiens
gacatccagatgacccagtctccatcctccctgtctgcatctgtaggagaccgtgtcaccatcacttgccgggcaagtcaggatattttcctgaatttagactggtatcagcagaaaccagggaaagcccctaagctcctgatcaattttggttccgagttgcaaagtggtgtcccatcacgtttcagtggcagtggatatgggacagatttcactctcaccatcagcagtctgcaacctgaagatttcgctacgtactactgtcaaccgtctttttacttcccttatacgttcggccaagggaccaaggtggaaatcaaacgg

SEQ ID NO: 658 - DNA, 324 bp, Homo sapiens
gacatccagatgacccagtctccatcctccctgtctgcatctgtaggagaccgtgtcaccatcacttgccgggcaagtcaggatatttacctgaatttaatgtggtatcagcagaaaccagggaaagcccctaagctcctgatcaattttggttccgagttgcaaagtggtgtcccatcacgtttcagtggcagtggatatgggacagatttcactctcaccatcagcagtctgcaacctgaagatttcgctacgtactactgtcaaccgtctttttacttcccttatacgttcggccaagggaccaaggtggaaatcaaacgg

SEQ ID NO: 659 - DNA, 324 bp, Homo sapiens
gacatccagatgacccagtctccatcctccctgtctgcatctgtaggagaccgtgtcaccatcacttgccgggcaagtcaggatatttacctgaatttactgtggtatcagcagaaaccagggaaagcccctaggctcctgatcaattttggttccgagttgcaaagtggtgtcccatcacgtttcagtggcagtggatatgggacagatttcactctcaccatcagcagtctgcaacctgaagatttcgctacgtactactgtcaaccgtctttttacttcccttatacgttcggccaagggaccaaggtggaaatcaaacgg

SEQ ID NO: 660 - DNA, 324 bp, Homo sapiens
gacatccagatgacccagtctccatcctccctgtctgcatctgcaggagaccgtgtcaccatcacttgccgggcaagtcaggatatttacctgaatttaatgtggtatcagcagaaaccagggaaagcccctaagctcctgatcaattttggttccgagttgcaaagtggtgtcccatcacgtttcagtggcagtggatatgggacagatttcactctcaccatcagcagtctgcaacctgaagatttcgctacgtactactgtcaaccgtctttttacttcccttatacgttcggccaagggaccaaggtggaaatcaaacgg

SEQ ID NO: 661 - DNA, 324 bp, Homo sapiens
gacatccagatgacccagtctccatcctccctgtctgcatctgtaggagaccgtgtcaccatcacttgccgggcaagtcaggatatttacctgaatttagcgtggtatcagcagaaaccagggaaagcccctaagctcctgatcaattttggttccgagttgcaaagtggtgtcccatcacgtttcagtggcagtggatatgggacagatttcactctcaccatcagcagtctgcaacctgaagatttcgctacgtactactgtcaaccgtctttttacttcccttatacgttcggccaagggaccaaggtggaaatcaaacgg

SEQ ID NO: 662 - DNA, 324 bp, Homo sapiens
gacatccagatgacccagtctccatcctccctgtctgcatctgtaggagaccgtgtcaccatcacttgccgggcaagtcaggatatttacctgaatttactgtggtaccagcagaaaccagggaaagcccctaagctcctgatcaattttggttccgagttgcaaagtggtgtcccatcacgtttcagtggcagtggatatgggacagatttcactctcaccatcagcagtctgcaacctgaagatttcgctacgtactactgtcaaccgtctttttacttcccttatacgttcggccaagggaccaaggtggaaatcaaacgg

SEQ ID NO: 663 - DNA, 324 bp, Homo sapiens
gacatccagatgacccagtctccatcctccctgtctgcatctgtaggagaccgtgtcaccatcacttgccgggcaagtcaggatatttacctgaatttaacctggtatcagcagaaaccagggaaagcccctaagctcctgatcaattttggttccgagttgcaaagtggtgtcccatcacgtttcagtggcagtggatatgggacagatttcactctcaccatcagcagtctgcaacctgatgatttcgctacgtactactgtcaaccgtctttttacttcccttatacgttcggccaagggaccaaggtggaaatcaaacgg

SEQ ID NO: 664 - DNA, 324 bp, Homo sapiens
gacatccagatgacccagtctccatcctccctgtctgcatctgtaggagaccgtgtcaccatcacttgccgggcaagtcaggatatttacctgaatttaccttggtaccagcagaaaccagggaaagcccctaagctcctgatcaattttggttccgagttgcaaagtggtgtcccatcacgtttcagtggcagtggatatgggacagatttcactctcaccatcagcagtctgcaacctgaagatttcgctacgtactactgtcaaccgtctttttacttcccttatacgttcggccaagggaccaaggtggaaatcaaacgg

SEQ ID NO: 665 - DNA, 324 bp, Homo sapiens
gacatccagatgacccagtctccatcctccctgtctgcatctgtaggagaccgtgtcaccatcacttgccgggcaagtcaggatatttacctgaatttaaagtggtaccagcagaaaccagggaaagcccctaagctcctgatcaattttggttccgagttgcaaagtggtgtcccatcacgtttcagtggcagtggatatgggacagatttcactctcaccatcagcagtctgcaacctgaagatttcgctacgtactactgtcaaccgtctttttacttcccttatacgttcggccaagggaccaaggtggaaatcaaacgg

SEQ ID NO: 666 - DNA, 324 bp, Homo sapiens
gacatccagatgacccagtctccatcctccctgtctgcatctgtaggagaccgtgtcaccatcacttgccgggcaagtcaggatatttacctgaatttaacgtggtaccagcagaaaccagggaaagcccctaagctcctgatcaattttggttccgagttgcaaagtggtgtcccatcacgtttcagtggcagtggatatgggacagatttcactctcaccatcagcagtctgcaacctgaagatttcgctacgtactactgtcaaccgtctttttacttcccttatacgttcggccaagggaccaaggtggaaatcaaacgg

SEQ ID NO: 667 - DNA, 324 bp, Homo sapiens
gacatccagatgacccagtctccatcctccctgtctgcatctgtaggagaccgtgtcaccatcacttgccgggcaagtcaggatatttacctgaatttagagtggtaccagcagaaaccagggaaagcccctaagctcctgatcaattttggttccgagttgcaaagtggtgtcccatcacgtttcagtggcagtggatatgggacagatttcactctcaccatcagcagtctgcaacctgaagatttcgctacgtactactgtcaaccgtctttttacttcccttatacgttcggccaagggaccaaggtggaaatcaaacgg

SEQ ID NO: 668 - DNA, 324 bp, Homo sapiens
gacatccagatgacccagtctccatcctccctgtctgcatctgtaggagaccgtgtcaccatcacttgccgggcaagtcaggatatttacctgaatttagactggtaccagcagaaaccagggaaagcccctaagctcctgatcaattttggttccgagttgaccagtggtgtcccatcacgtttcagtggcagtggatatgggacagatttcactctcaccatcagcagtctgcaacctgaagatttcgctacgtactactgtcaaccgtctttttacttcccttatacgttcggccaagggaccaaggtggaaatcaaacgg

SEQ ID NO: 669 - DNA, 324 bp, Homo sapiens
gacatccagatgacccagtctccatcctccctgtctgcatctgtaggagaccgtgtcaccatcacttgccgggcaagtcaggatatttacctgaatttagactggtatcagcagaaaccagggaaagcccctaagctcctgatcaattttggttccgagttgaacagtggtgtcccatcacgtttcagtggcagtggatatgggacagatttcactctcaccatcagcagtctgcaacctgaagatttcgctacgtactactgtcaaccgtctttttacttcccttatacgttcggccaagggaccaaggtggaaatcaaacgg

SEQ ID NO: 670 - DNA, 324 bp, Homo sapiens
gacatccagatgactcagtctccatcctccctgtctgcatctgtaggagaccgtgtcaccatcacttgccgggcaagtcaggatatttacctgaatttagactggtatcagcagaaaccagggaaagcccctaagctcctgatcaattttggttccgagttgtacagtggtgtcccatcacgtttcagtggcagtggatatgggacagatttcactctcaccatcagcagtctgcaacctgaagatttcgctacgtactactgtcaaccgtctttttacttcccttatacgttcggccaagggaccaaggtggaaatcaaacgg

SEQ ID NO: 671 - DNA, 324 bp, Homo sapiens
gacatccagatgacccagtctccatcctccctgtctgcatctgtaggagaccgtgtcaccatcacttgccgggcaagtcaggatatttacctgaatttagactggtatcagcagaaaccagggaaagcccctaagctcctgatcaattttggttccgagttgttcagtggagtcccatcacgtttcagtggcagtggatatgggacagatttcactctcaccatcagcagtctgcaacctgaagatttcgctacgtactactgtcaaccgtctttttacttcccttatacgttcggccaagggaccaaggtggaaatcaaacgg

SEQ ID NO: 672 - DNA, 324 bp, Homo sapiens
gacatccagatgacccagtctccatcctccctgtctgcatctgtaggagaccgtgtcaccatcacttgccgggcaagtcaggatatttacctgaatttagactggtatcagcagaaaccagggaaagcccctaagctcctgatcaattttggttccgagttgctcagtggtgtcccatcacgtttcagtggcagtggatatgggacagatttcactctcaccatcagcagtctgcaacctgaagatttcgctacgtactactgtcaaccgtctttttacttcccttatacgttcggccaagggaccaaggtggaaatcaaacgg

SEQ ID NO: 673 - DNA, 324 bp, Homo sapiens
gacatccagatgacccagtctccatcctccctgtctgcatctgtaggagaccgtgtcaccatcacttgccgggcaagtcaggatatttacctgaatttagactggtatcagcagaaaccagggaaagcccctaagctcctgatcaattttggttccgagttgcggagtggcgtcccatcacgtttcagtggcagtggatatgggacagatttcactctcaccatcagcagtctgcaacccgaagatttcgctacgtactactgtcaaccgtctttttacttcccttatacgttcggccaagggaccaaggtggaaatcaaacgg

SEQ ID NO: 674 - DNA, 324 bp, Homo sapiens
gacatccagatgacccagtctccatcctccctgtctgcatctgtaggagaccgtgtcaccatcacttgccgggcaagtcaggatatttacctgaatttagactggtatcagcagaaaccagggaaagcccctaagctcctgatcaattttggttccgagttgcccagtggcgtcccatcacgtttcagtggcagtggatatgggacagatttcactctcaccatcagcagtctgcaacctgaagatttcgctacgtactactgtcaaccgtctttttacttcccttatacgttcggccaagggaccaaggtggaaatcaaacgg

SEQ ID NO: 675 - DNA, 324 bp, Homo sapiens
gacatccagatgacccagtctccatcctccctgtctgcatctgtaggagaccgtgtcaccatcacttgccgggcaagtcaggatatttacctgaatttagactggtatcagcagaaaccagggaaagcccctaagcccctgatcaattttggttccgagttgcaacccggtgtcccatcacgtttcagtggcagtggatatgggacagatttcactctcaccatcagcagtctgcaacctgaagatttcgctacgtactactgtcaaccgtctttttacttcccttatacgttcggccaagggaccaaggtggaaatcaaacgg

SEQ ID NO: 676 - DNA, 324 bp, Homo sapiens
gacatccagatgacccagtctccatcctccctgtctgcatctgtaggagaccgtgtcaccatcacttgccgggcaagtcaggatatttacctgaatttagactggtatcagcagaaaccagggaaagcccctaagctcctgatcaattttggttccgagttgcaacccggtgtcccatcacgtttcagtggcagtggatatgggacagatttcactctcaccatcagcagtctgcaacctgaagatttcgctacgtactactgtcaaccgtctttttacttcccttatacgttcggccaagggaccaaggtggaaatcaaacgg

SEQ ID NO: 677 - DNA, 324 bp, Homo sapiens
gacatccagatgacccagtctccatcctccctgtctgcatctgtaggagaccgtgtcaccatcacttgccgggcaagtcaggatatttacctgaatttagactggtatcagcagaaaccagggaaagcccctaagctcctgatcaattttggttccgagttgcaacacggcgtcccatcacgtttcagtggcagtggatatgggacagatttcactctcaccatcagcagtctgcaacctgaagatttcgctacgtactactgtcaaccgtctttttacttcccttatacgttcggccaagggaccaaggtggaaatcaaacgg

SEQ ID NO: 678 - DNA, 324 bp, Homo sapiens
gacatccagatgacccagtctccatcctccctgtctgcatctgtaggagaccgtgtcaccatcacttgccgggcaagtcaggatatttacctgaatttagactggtatcagcagaaaccagggaaagcccctaagctcctgatcaattttggttccgagttgcaactcggtgtcccatcacgtttcagtggcggtggatatgggacagatttcactctcaccatcagcagtctgcaacctgaagatttcgctacgtactactgtcaaccgtctttttacttcccttatacgttcggccaagggaccaaggtggaaatcaaacgg

SEQ ID NO: 679 - DNA, 324 bp, Homo sapiens
gacatccagatgacccagtctccatcctccctgtctgcatctgtaggagaccgtgtcaccatcacttgccgggcaagtcaggatatttacctgaatttagactggtatcagcagaaaccagggaaagcccctaagctcctgatcaattttggttccgagttgcaaaagggtgtcccatcacgtttcagtggcagtggatatgggacagatttcactctcaccatcagcagtctgcaacctgaagatttcgctacgtactactgtcaaccgtctttttacttcccttatacgttcggccaagggaccaaggtggaaatcaaacgg

SEQ ID NO: 680 - DNA, 324 bp, Homo sapiens
gacatccagatgacccagtctccatcctccctgtctgcatctgtaggagaccgtgtcaccatcacttgccgggcaagtcaggatatttacctgaatttagactggtatcagcagaaaccagggaaagcccctaagctcctgatcaattttggttctgagttgcaattcggtgtcccatcacgtttcagtggcagtggatatgggacagatttcactctcaccatcagcagtctgcaacctgaagatttcgctacgtactactgtcaaccgtctttttacttcccttatacgttcggccaagggaccaaggtggaaatcaaacgg

SEQ ID NO: 681 - DNA, 324 bp, Homo sapiens
gacatccagatgacccagtctccatcctccctgtctgcatctgtaggagaccgtgtcaccatcacttgccgggcaagtcaggatatttacctgaatttagactggtatcagcagaaaccagggaaagcccctaagctcctgatcaattttggttccgagttgcaacagggtgtcccatcacgtttcagtggcagtggatatgggacagatttcactctcaccatcagcagtctgcaacctgaagatttcgctacgtactactgtcaaccgtctttttacttcccttatacgttcggccaagggaccaaggtggaaatcaaacgg

SEQ ID NO: 682 - DNA, 324 bp, Homo sapiens
gacatccagatgacccagtctccatcctccctgtctgcatctgtaggagaccgtgtcaccatcacttgccgggcaagtcaggatatttacctgaatttagactggtatcagcagaaaccagggaaagcccctaagctcctgatcaattttggttccgagttgcaaagtggtgtcccatcacgtttcagtggcagtggatatgggacagatttcactctcaccatcagcagtctgcaacctgaagatttcgctacgtactactgtaccccgtctttttacttcccttatacgttcggccaagggaccaaggtggaaatcaaacgg

SEQ ID NO: 683 - DNA, 324 bp, Homo sapiens
gacatccagatgacccagtctccatcctccctgtctgcatctgtaggagaccgtgtcaccatcacttgccgggcaagtcaggatatttacctgaatttagactggtatcagcagaaaccagggaaagcccctaagctcctgatcaattttggttccgagttgcaaagtggtgtcccatcacgtttcagtggcagtggatatgggacagatttcactctcaccatcagcagtctgcaacctgaagatttcgctacgtactactgtaagccgtctttttacttcccttatacgttcggccaagggaccaaggtggaaatcaaacgg

SEQ ID NO: 684 - DNA, 324 bp, Homo sapiens
gacatccagatgacccagtctccatcctccctgtctgcatctgtaggagaccgtgtcaccatcacttgccgggcaagtcaggatatttacctgaatttagactggtatcagcagaaaccagggaaagcccctaagctcctgatcaattttggttccgagttgcaaagtggtgtcccatcacgtttcagtggcagtggatatgggacagatttcactctcaccattagcagtctgcaacctgaagatttcgctatgtactactgtgcgccgtctttttactttccttatacgttcggccaagggaccaaggtggaaatcaaacgg

SEQ ID NO: 685 - DNA, 324 bp, Homo sapiens
gacatccagatgacccagtctccatcctccctgtctgcatctgtaggagaccgtgtcaccatcacttgccgggcaagtcaggatatttacctgaatttagactggtatcagcagaaaccagggaaagcccctaagctcctgatcaattttggttccgagttgcaaagtggtgtcccatcacgtttcagtggcagtggatatgggacagatttcactctcaccatcagcagtctgcaacctgaagatttcgctacgtactactgttccccgtctttttacttcccttatacgttcggccaagggaccaaggtggaaatcaaacgg

SEQ ID NO: 686 - DNA, 324 bp, Homo sapiens
gacatccagatgacccagtctccatcctccctgtctgcatctgtaggagaccgtgtcaccatcacttgccgggcaagtcaggatatttacctgaatttagactggtatcagcagaaaccagggaaagcccctaagctcctgatcaattttggttccgagttgcaaagtggtgtcccatcacgtttcagtggcagtggatatgggacagatttcactctcaccatcagcagtctgcaacctgaagatttcgctacgtactactgtctcccgtctttttacttcccttatacgttcggccaagggaccaaggtggaaatcaaacgg

SEQ ID NO: 687 - DNA, 324 bp, Homo sapiens
gacatccagatgacccagtctccatcctccctgtctgcatctgtaggagaccgtgtcaccatcacttgccgggcaagtcaggatatttacctgaatttagactggtatcagcagaaaccagggaaagcccctaagctcctgatcaattttggttccgagttgcaaagtggtgtcccatcacgtttcagtggcagtggatatgggacagatttcactctcaccatcagcagtctgcaacctgaagatttcgctacgtactactgtcaagcgtctttttacttcccttatacgttcggccaagggaccaaggtggaaatcaaacgg

SEQ ID NO: 688 - DNA, 324 bp, Homo sapiens
gacatccagatgacccagtctccatcctccctgtctgcatctgtaggagaccgtgtcaccatcacttgccgggcaagtcaggatatttacctgaatttagactggtatcagcagaaaccagggaaagcccctaagctcctgatcaattttggttccgagttgcaaagtggtgtcccatcacgtttcagtggcagtggatatgggacagatttcactctcaccatcagcggtctgcaacctgaagatttcgctacgtactattgtcaagcgtctttttacttcccttatacgttcggccaagggaccaaggtggaaatcaaacgg

SEQ ID NO: 689 - DNA, 324 bp, Homo sapiens
gacatccagatgacccagtctccatcctccctgtctgcatctgtaggagaccgtgtcaccatcacttgccgggcaagtcaggatatttacctgaatttagactggtatcagcagaaaccagggaaagcccctaagctcctgatcaattttggttccgagttgcaaagtggtgtcccatcacgtttcagtggcagtggatatgggacagatttcactctcaccatcagcagtctgcaacctgaagatttcgctacgtactactgtcaagggtctttttacttcccttatacgttcggccaagggaccaaggtggaaatcaaacgg

SEQ ID NO: 690 - DNA, 324 bp, Homo sapiens
gacatccagatgacccagtctccatcctccctgtctgcatctgtaggagaccgtgtcaccatcacttgccgggcaagtcaggatatttacctgaatttagactggtaccagcagaaaccagggaaagcccctaagctcctgatcagctttggttccgagttgcaaagtggtgtcccatcacgtttcagtggcagtggatatgggacagatttcactctcaccatcagcagtctgcaacctgaagatttcgctacgtactactgtcaaccgtctttttacttcccttatacgttcggccaagggaccaaggtggaaatcaaacgg

SEQ ID NO: 691 - DNA, 324 bp, Homo sapiens
gacatccagatgacccagtctccatcctccctgtctgcatctgtaggagaccgtgtcaccatcacttgccgggcaagtcaggatatttacctgaatttagactggtaccagcagaaaccagggaaagcccctaagctcctgatcacctttggttccgagttgcaaagtggtgtcccatcacgtttcagtggcagtggatatgggacagatttcactctcaccatcagcagtctgcaacctgaagatttcgctacgtactactgtcaaccgtctttttacttcccttatacgttcggccaagggaccaaggtggaaatcaaacgg

SEQ ID NO: 692 - DNA, 324 bp, Homo sapiens
gacatccagatgacccagtctccatcctccctgtctgcatctgtaggagaccgtgtcaccatcacttgccgggcaagtcaggatatttacctgaatttagactggtaccagcagaaaccagggaaagcccctaagctcctgatcatgtttggttccgagttgcaaagtggtgtcccatcacgtttcagtggcagtggatatgggacagatttcactctcaccatcagcagtctgcaacctgaagatttcgctacgtactactgtcaaccgtctttttacttcccttatacgttcggccaagggaccaaggtggaaatcaaacgg

SEQ ID NO: 693 - DNA, 324 bp, Homo sapiens
gacatccagatgacccagtctccatcctccctgtctgcatctgtaggagaccgtgtcaccatcacttgccgggcaagtcaggatatttacctgaatttagactggtaccagcagaaaccagggaaagcccctaagctcttgatcgtctttggttccgagttgcaaagtggtgtcccatcacgtttcagtggcagtggatatgggacagatttcactctcaccatcagcagtctgcaacctgaagatttcgctacgtactactgtcaaccgtctttttacttcccttatacgttcggccaagggaccaaggtggaaatcaaacgg

SEQ ID NO: 694 - DNA, 324 bp, Homo sapiens
gacatccagatgacccagtctccatcctccctgtctgcatctgtaggagaccgtgtcaccatcacttgccgggcaagtcaggatatttacctgaatttagactggtatcagcagaaaccagggaaagcccctaagctcctgatcaaatttggttccgagttgcaaagtggtgtcccatcacgtttcagtggcagtggatatgggacagatttcactctcaccatcagcagtctgcaacctgaagatttcgctacgtactactgtcaaccgtctttttacttcccttatacgttcggccaagggaccaaggtggaaatcaaacgg

SEQ ID NO: 695 - DNA, 324 bp, Homo sapiens
gacatccagatgacccagtctccatcctccctgtctgcatctgtaggagaccgtgtcaccatcacttgccgggcaagtcaggatatttacctgaatttagactggtatcagcagaaaccagggaaagcccctaagctcctgatctcctttggttccgagttgcaaagtggtgtcccatcacgtttcagaggcagtggatatgggacagatttcactctcaccatcagcagtctgcaacctgaagatttcgctacgtactactgtcaaccgtctttttacttcccttatacgttcggccaagggaccaaggtggaaatcaaacgg

SEQ ID NO: 696 - DNA, 324 bp, Homo sapiens
gacatccagatgacccagtctccatcctccctgtctgcatctgtaggagaccgtgtcaccatcacttgccgggcaagtcaggatatttacctgaatttagactggtaccagcagaaaccagggaaagcccctaagctcctgatcaattacggttccgagttgcaaagtggtgttccatcacgtttcagtggcagtggatatgggacagatttcactctcaccatcagcagtctgcaacctgaagatttcgctacgtactactgtcaaccgtctttttacttcccttatacgttcggccaagggaccaaggtggaaatcaaacgg

SEQ ID NO: 697 - DNA, 324 bp, Homo sapiens
gacatccagatgacccagtctccatcctccctgtctgcatctgtaggagaccgtgtcaccatcacttgccgggcaagtcaggatatttacctgaatttagactggtaccagcagaaaccagggaaagcccctaagctcctgatcaatagcggttccgagttgcaaagtggtgtcccatcacgtttcagtggcagtggatatgggacagatttcactctcaccatcagcagtctgcaacctgaagatttcgctacgtactactgtcaaccgtctttttacttcccttatacgttcggccaagggaccaaggtggaaatcaaacgg

SEQ ID NO: 698 - DNA, 324 bp, Homo sapiens
gacatccagatgacccagtctccatcctccctgtctgcatctgtaggagaccgtgtcaccatcacttgccgggcaagtcaggatatttacctgaatttagactggtaccagcagaaaccagggaaagcccctaagctcctgatcaatctcggttccgagttgcaaagtggtgtcccatcacgtttcagtggcagtggatatgggacagatttcactctcaccatcagcagtctgcaacctgaagatttcgctacgtactactgtcaaccgtctttttacttcccttatacgttcggccaagggaccaaggtggaaatcaaacgg

SEQ ID NO: 699 - DNA, 324 bp, Homo sapiens
gacatccagatgacccagtctccatcctccctgtctgcatctgtaggagaccgtgtcaccatcacttgccgggcaagtcaggatatttacctgaatttagactggtaccagcagaaaccagggaaagcccctaagctcctgatcaatggcggttccgagttgcaaagtggtgtcccatcacgtttcagtggcagtggatatgggacagatttcactctcaccatcagcagtctgcaacctgaagatttcgctacgtactactgtcaaccgtctttttacttcccttatacgttcggccaagggaccaaggtggaaatcaaacgg

SEQ ID NO: 700 - DNA, 324 bp, Homo sapiens
gacatccagatgacccagtctccatcctccctgtctgcatctgtaggagaccgtgtcaccatcacttgccgggcaagtcaggatatttacccgaatttagactggtaccagcagaaaccagggaaagcccctaagctcctgatcaattcgggttccgagttgcaaagtggtgtcccatcacgtttcagtggcagtggatatgggacagatttcactctcaccatcagcagtctgcaacctgaagatttcgctacgtactactgtcaaccgtctttttacttcccttatacgttcggccaagggaccaaggtggaaatcaaacgg

SEQ ID NO: 701 - DNA, 324 bp, Homo sapiens
gacatccagatgacccagtctccatcctccctgtctgcatctgtaggagaccgtgtcaccatcacttgccgggcaagtcaggatatttacctgaatttagactggtaccagcagaaaccagggaaagcccctaagctcctgatcaatctgggttccgagttgcaaagtggtgtcccatcacgtttcagtggcagtggatatgggacagatttcactctcaccatcagcagtctgcaacctgaagatttcgctacgtactactgtcaaccgtctttttacttcccttatacgttcggccaagggaccaaggtggaaatcaaacgg

SEQ ID NO: 702 - DNA, 324 bp, Homo sapiens
gacatccagatgacccagtctccatcctccctgtctgcatctgtaggagaccgtgtcaccatcacttgccgggcaagtcaggatatttacctgaatttagactggtaccagcagaaaccagggaaagcccctaagctcctgatcaatttttcgtccgagttgcaaagtggtgtcccatcacgtttcagtggcagtggatatgggacagatttcactctcaccatcagcagtctgcaacctgaagatttcgctacgtactactgtcaaccgtctttttacttcccttatacgttcggccaagggaccaaggtggaaatcaaacgg

SEQ ID NO: 703 - DNA, 324 bp, Homo sapiens
gacatccagatgacccagtctccatcctccctgtctgcatctgtaggagaccgtgtcaccatcacttgccgggcaagtcaggatatttacctgaatttagactggtaccagcagaaaccagggaaagcccctaagctcctgatcaattttgcgtccgagttgcaaagtggtgtcccatcacgtttcagtggcagtggatatgggacagatttcactctcaccatcagcagtctgcaacctgaagatttcgctacgtactactgtcaaccgtctttttacttcccttatacgttcggccaagggaccaaggtggaaatcaaacgg

SEQ ID NO: 704 - DNA, 324 bp, Homo sapiens
gacatccagatgacccagtctccatcctccctgtctgcatctgtaggagaccgtgtcaccatcacttgccgggcaagtcaggatatttacctgaatttagactggtaccagcagaaaccagggaaagcccctaagctcctgatcaattttgtgtccgagttgcaaagtggtgtcccatcacgtttcagtggcagtggatatgggacagatttcactctcaccatcagcagtctgcaacctgaagatttcgctacgtactactgtcaaccgtctttttacttcccttatacgttcggccaagggaccaaggtggaaatcaaacgg

SEQ ID NO: 705 - DNA, 324 bp, Homo sapiens
gacatccagatgacccagtctccatcctccctgtctgcatctgtaggagaccgtgtcaccatcacttgccgggcaagtcaggatatttacctgaatttagactggtaccagcagaaaccagggaaagcccctaagctcctgatcaattttggttccagcttgcaaagtggtgtcccatcacgtttcagtggcagtggatatgggacagatttcactctcaccatcagcagtctgcaacctgaagatttcgctacgtactactgtcaaccgtctttttacttcccttatacgttcggccaagggaccaaggtggaaatcaaacgg

SEQ ID NO: 706 - DNA, 324 bp, Homo sapiens
gacatccagatgacccagtctccatcctccctgtctgcatctgtaggagaccgtgtcaccatcacttgccgggcaagtcaggatatttacctgaatttagactggtaccagcagaaaccagggaaagcccctaagctcctgatcaattttggttccgcgttgcaaagtggtgtcccatcacgtttcagtggcagtggatatgggacagatttcactctcaccatcagcagtctgcaacctgaagatttcgctacgtactactgtcaaccgtctttttacttcccttatacgttcggccaagggaccaaggtggaaatcaaacgg

SEQ ID NO: 707 - DNA, 324 bp, Homo sapiens
gacatccagatgacccagtctccatcctccctgtctgcatctgtaggagaccgtgtcaccatcacttgccgggcaagtcaggatatttacctgaatttagactggtatcagcagaaaccagggaaagcccctaagctcctgatcaattttggttccacgttgcaaagtggtgtcccatcacgtttcagtggcagtggatatgggacagatttcactctcaccatcagcagtctgcaacctgaagatttcgctacgtactactgtcaaccgtctttttacttcccttatacgttcggccaagggaccaaggtggaaatcaaacgg

SEQ ID NO: 708 - DNA, 324 bp, Homo sapiens
gacatccagatgacccagtctccatcctccctgtctgcatctgtaggagaccgtgtcaccatcacttgccgggcaagtcaggatatttacctgaatttagactggtaccagcagaaaccagggaaagcccctaagctcctgatcaattttggttccgacttgcaaagtggtgtcccatcacgtttcagtggcagtggatatgggacagatttcactctcaccatcagcagtctgcaacctgaagatttcgctacgtactactgtcaaccgtctttttacttcccttatacgttcggccaagggaccaaggtggaaatcaaacgg

SEQ ID NO: 709 - DNA, 324 bp, Homo sapiens
gacatccagatgacccagtctccatcctccctgtctgcatctgtaggagaccgtgtcaccatcacttgccgggcaagtcaggatatttacctgaatttagactggtaccagcagaaaccagggaaagcccctaagctcctgatcagctttggttccgagttgcggagtggtgtcccatcacgtttcagtggcagtggatatgggacagatttcactctcaccatcagcagtctgcaacctgaagatttcgctacgtactactgtcaaccgtctttttacttcccttatacgttcggccaagggaccaaggtggaaatcaaacgg

SEQ ID NO: 710 - DNA, 324 bp, Homo sapiens
gacatccagatgacccagtctccatcctccctgtctgcatctgtaggagaccgtgtcaccatcacttgccgggcaagtcaggatatttacctgaatttagactggtatcagcagaaaccagggaaagcccctaagcttctgatcagctttggttccgagttgcaacccggtgtcccatcacgtttcagtggcagtggatatgggacagatttcactctcaccatcagcagtctgcaacctgaagatttcgctacgtactactgtcaaccgtctttttacttcccttatacgttcggccaagggaccaaggtggaaatcaaacgg

SEQ ID NO: 711 - DNA, 324 bp, Homo sapiens
gacatccagatgacccagtctccatcctccctgtctgcatctgtaggagaccgtgtcaccatcacttgccgggcaagtcaggatatttacctgaatttagactggtaccagcagaaaccagggaaagcccctaagctcctgatcagctttggttccgagttgcggcccggtgttccatcacgtttcagtggcagtggatatgggacagatttcactctcaccatcagcagtctgcaacctgaagatttcgctacgtactactgtcaaccgtctttttacttcccttatacgttcggccaagggaccaaggtggaaatcaaacgg

SEQ ID NO: 712 - DNA, 324 bp, Homo sapiens
gacatccagatgacccagtctccatcctccctgtctgcatctgtaggagaccgtgtcaccatcacttgccgggcaagtcaggatatttacctgaatttagactggtaccagcagaaaccagggaaagcccctaagctcctgatcaattttggttccgagttgcggcccggtgtcccatcacgtttcagtggcagtggatatgggacagatttcactctcaccatcagcagtctgcaacctgaagatttcgctacgtactactgtcaaccgtctttttacttcccttatacgttcggccaagggaccaaggtggaaatcaaacgg

SEQ ID NO: 713 - DNA, 324 bp, Homo sapiens
gacatccagatgacccagtctccatcctccctgtctgcatctgtaggagaccgtgtcaccatcacttgccgggcaagtcaggatatttacctgaatttagactggtaccagcagaaaccagggaaagcccctaagctcctgatcagctttggttccgagttgcaaaagggtgtcccatcacgtttcagtggcagtggatatgggacagatttcactctcaccatcagcagtctgcaacctgaagatttcgctacgtactactgtcaaccgtctttttacttcccttatacgttcggccaagggaccaaagtggaaatcaaacgg

SEQ ID NO: 714 - DNA, 324 bp, Homo sapiens
gacatccagatgacccagtctccatcctccctgtctgcatctgtaggagaccgtgtcaccatcacttgccgggcaagtcaggatatttacctgaatttagactggtatcagcagaaaccagggaaagcccctaagctcctgatcagctttggttccgagttgcggaagggtgtcccatcacgtttcagtggcagtggatatgggacagatttcactctcaccatcagcagtctgcaacctgaagatttcgctacgtactactgtcaaccgtctttttacttcccttatacgttcggccaagggaccaaggtggaaatcaaacgg

SEQ ID NO: 715 - DNA, 324 bp, Homo sapiens
gacatccagatgacccagtctccatcctccctgtctgcatctgtaggagaccgtgtcaccatcacttgccgggcaagtcaggatatttacctgaatttagactggtaccagcagaaaccagggaaagcccctaagctcctgatcaattttggttccgagttgcggaagggtgtcccatcacgtttcagtggcagtggatatgggacagatttcactctcaccatcagcagtctgcaacctgaagatttcgctacgtactactgtcaaccgtctttttacttcccttatacgttcggccaagggaccaaggtggaaatcaaacgg

SEQ ID NO: 716 - DNA, 324 bp, Homo sapiens
gacatccagatgacccagtctccatcctccctgtctgcatctgtaggagaccgtgtcaccatcacttgccgggcaagtcagacgatttacctgaatttagactggtaccagcagaaaccagggaaagcccctaagctcctgatcagctttggttccgagttgcaaaagggtgtcccatcacgtttcagtggcagtggatatgggacagatttcactctcaccatcagcagtctgcaacctgaagatttcgctacgtactactgtcaaccgtctttttacttcccttatacgttcggccaagggaccaaagtggaaatcaaacgg

SEQ ID NO: 717 - DNA, 324 bp, Homo sapiens
gacatccagatgacccagtctccatcctccctgtctgcatctgtaggagaccgtgtcaccatcacttgccgggcaagtcagacgatttacctgaatttagactggtaccagcagaaaccagggaaagcccctaagctcctgatcaattttggttccgagttgcaaagtggtgtcccatcacgtttcagtggcagtggatatgggacagatttcactctcaccatcagcagtctgcaacctgaagatttcgctacgtactactgtcaaccggctttttacttcccttatacgttcggccaagggaccaaggtggaaatcaaacgg

SEQ ID NO: 718 - DNA, 324 bp, Homo sapiens
gacatccagatgacccagtctccatcctccctgtctgcatctgtaggagaccgtgtcaccatcacttgccgggcaagtcaggatatttacctgaatttagactggtaccagcagaaaccagggaaagcccctaagctcctgatcagctttggttccgagttgcaaaagggtgtcccatcacgtttcagtggcagtggatatgggacagatttcactctcaccatcagcagtctgcaacctgaagattttgctacgtactactgtcaacaggctttttacttcccttatacgttcggccaagggaccaaggtggaaatcaaacgg

SEQ ID NO: 719 - DNA, 324 bp, Homo sapiens
gacatccagatgacccagtctccatcctccctgtctgcatctgtaggagaccgtgtcaccatcacttgccgggcaagtcagacgatttacctgaatttagactggtaccagcagaaaccagggaaagcccctaagctcctgatcagctttggttccgagttgcaaaagggtgtcccatcacgtttcagtggcagtggatatgggacagatttcactctcaccatcagcagtctgcaacctgaagattttgctacgtactactgtcaacaggctttttacttcccttatacgttcggccaagggaccaaggtggaaatcaaacgg

SEQ ID NO: 720 - DNA, 324 bp, Homo sapiens
gacatccagatgacccagtctccatcctccctgtctgcatctgtaggagaccgtgtcaccatcacttgccgggcaagtcagcagatttataatgctttacggtggtaccagcagaaaccagggaaagcccgtaagctcctgatctatcataagtcccagttgcaaagtggggtcccatcacgtttcagtggcagtggatctgggacagatttcactctcaccatcagcagtctgcaacctgaagattttgctacgtactactgtcaacagacttatagttttcctcatacgttcggccaagggaccaaggtggaaatcaaacgg

SEQ ID NO: 721 - DNA, 324 bp, Homo sapiens
gacatccagatgacccagtctccatcctccctgtctgcatctgtaggagaccgtgtcaccatcacttgccgggcaagtcaggatatttggcttaatttatcgtggtatcagcagaaaccagggaaagcccctaagctcctgatctatgatggttccactttgcaaagtggggtcccatcacgtttcagtggcagtggatctgggacagatttcactctcaccatcagcagtctgcaacctgaagattttgctacgtactactgtcaaccgtcgtttatttggccttatacgttcggccaagggaccaaggtggaaatcaaacgg

SEQ ID NO: 722 - DNA, 324 bp, Homo sapiens
gacatcaagatgacccagtctccatcctccctgtctgcatctgtaggagaccgtgtcactatcacttgccgggcaagtcagaatattggtagggagttacggtggtatcagcagaaaccagggaaagcccctaagctcctgatctatcatgcgtcccatttgcaaagtggggtcccatcacgtttcagtggcagtggatctgggacagatttcactctcaccatcagcagtctgcaacctgaagattttgctacgtactactgtcaacagtattattattttcctcttacgttcggccaagggaccaaggtggaaatcaaacgg

SEQ ID NO: 723 - protein, 108 aa, Homo sapiens
DIQMTQSPSSLSASVGDRVTITCRASQSIIKHLKWYQQKPGKAPKLLIYGASRLQSGVPSRFSGSGSGTDFTLTISSLQPEDFATYYCQQGARWPQTFGQGTKVEIKR

SEQ ID NO: 724 - protein, 108 aa, Homo sapiens
DIQMTQSPSSLSASVGDRVTITCRASQSIFRHLKWYQQKPGKAPKLLIYAASRLQSGVPSRFSGSGSGTDFTLTISSLQPEDFATYYCQQVALYPKTFGQGTKVEIKR

SEQ ID NO: 725 - protein, 108 aa, Homo sapiens
DIQMTQSPSSLSASVGDRVTITCRASQSIYYHLKWYQQKPGKAPKLLIYKASTLQSGVPSRFSGSGSGTDFTLTISSLQPEDFATYYCQQVRKVPRTFGQGTKVEIKR

SEQ ID NO: 726 - protein, 108 aa, Homo sapiens
DIQTTQSPSSLSASVGDRVTITCRASQYIGRYLRWYQQKPGKAPKLLIYDSSVLQSGVPSRFSGSGSGTDFTLTISSLQPEDFATYYCQQRYRMPYTFGQGTRVEIKR

SEQ ID NO: 727 - protein, 108 aa, Homo sapiens
DIQMTQSPSSLSASVGDRVTITCRASQYIGRYLRWYQQKPGKAPKLLIYDSSVLQSGVPSRFSGSGSGTDFTLTISSLQPEDFATYYCQQRYMQPFTFGQGTKVEIKR

SEQ ID NO: 728 - protein, 108 aa, Homo sapiens
DIQMTQSPSSLSASVGDRVTITCRASQWIGRYLRWYQQKPGKAPKLLIYNGSQLQSGVPSRFSGSGSGTDFTLTISSLQPEDFATYYCQQRYLQPYTFGQGTKVEIKR

SEQ ID NO: 729 - protein, 108 aa, Homo sapiens
DIQMTQSPSSLSASVGDRVTITCRASQYISRQLRWYQQKPGKAPRLLIYGASVLQSGIPSRFSGSGSGTDFTLTISSLQPEDFATYYCQQRYITPYTFGQGTKVEVKR

SEQ ID NO: 730 - protein, 108 aa, Homo sapiens
DIQMTQSPSSLSASVGDRVTITCRASQYIGRYLRWYQQKPGKAPKLLIYDSSVLQSGVPSRFSGSGSGTDFTLTISSLQPEDFATYYCQQRYSSPYTFGQGTKVEIKR

SEQ ID NO: 731 - protein, 108 aa, Homo sapiens
DIQMTQSPSSLSASVGDRVTITCRASQWIHRQLKWYQQKPGKAPKLLIYYASILQSGVPSRFSGSGSGTDFTLTISSLQPEDFATYYCQQTFSKPSTFGQGTKVEIKR

SEQ ID NO: 732 - protein, 108 aa, Homo sapiens
DIQMTQSPSSLSASVGDRVTITCRASQKIATYLNWYQQKPGKAPKLLIYRSSSLQSAVPSRFSGSGSGTVFTLTISSLQPEDFATYYCQQTYAVPPTFGQGTKVEIKR

SEQ ID NO: 733 - protein, 108 aa, Homo sapiens
DIQMTQSPSSLSASVGDRVTITCRASQWIDTGLAWYQQKPGKAPRLLIYNVSRLQSGVPSRFSGSGSGTDFTLTISSLQPEDFATYYCQQYWGSPTTFGQGTKVEIKR

SEQ ID NO: 734 - protein, 108 aa, Homo sapiens
DIQMTQSPSSLSASVGDRVTITCRASQEIYSWLAWYQQRPGKAPKLLIYNASHLQSGVPSRFSGSGSGTDFTLTISSLQPEDFATYYCQQVIGDPVTFGQGTKVEIKR

SEQ ID NO: 735 - protein, 108 aa, Homo sapiens
DIQMTQSPSSLSASVGDRVTITCRASQSISSYLNWYQQKPGKAPTLLIYRLSVLQSGVPSRFSGSGSGTDFTLTISSLQPEDFATYYCQQTYNVPPTFGQGTKVEIKR

SEQ ID NO: 736 - protein, 108 aa, Homo sapiens
DIQMTQSPSSLSASVGDRVTITCRASQSISSYLNWYQQKPGKAPKLLIYRNSFLQSGVPSRFSGSGSGTDFTLTISSLQPEDFATYYCQQTYTVPPTFGQGTKVEIKQ

SEQ ID NO: 737 - protein, 108 aa, Homo sapiens
DIQMTQSPSSLSASVGDRVTITCRASQSISSYLNWYQQKPGKAPKLLIYRNSQLQSGVPSRFSGSGSGTDFTLTISSLQPEDFATYYCQQTFAVPPTFGQGTKVEIKR

SEQ ID NO: 738 - protein, 35 aa, Artificial Sequence
  Consensus sequence
  VARIANT 30: Xaa = S, Y, H, W or D
  VARIANT 31: Xaa = K, P, R, E, L or D
EVQLLESGGGLVQPGGSLRLSCAASGFTFXXYNMS

SEQ ID NO: 739 - protein, 123 aa, Homo sapiens
EVQLLESGGGLVQPGGSLRLSCAASGFTFSKYWMSWVRQAPGKGLEWVSSIDFMGPHTYYADSVKGRFTISRDNSKNTLYLQMNSLRAEDTAVYYCAKGRTSMLPMKGKFDYWGQGTLVTVSS

SEQ ID NO: 740 - protein, 118 aa, Homo sapiens
EVQLLESGGGLVQPGGSLRLSCAASGFTFYDYNMSWVRQAPGKGLEWVSTITHTGGVTYYADSVKGRFTISRDNSKNTLYLQMNSLRAEDTAVYYCAKQNPSYQFDYWGQGTLVTVSS

SEQ ID NO: 741 - protein, 118 aa, Homo sapiens
EVQLLESGGGLVQPGGSLRLSCAASGFTFHRYSMSWVRQAPGKGLEWVSTILPGGDVTYYADSVKGRFTISRDNSKNTLYLQMNSLRAEDTAVYYCAKQTPDYMFDYWGQGTLVTVSS

SEQ ID NO: 742 - protein, 117 aa, Homo sapiens
EVQLLESGGGLVQPGGSLRLSCAASGFTFWKYNMAWVRQAPGKGLEWVSTILGEGNNTYYADSVKGRFTISRDNSKNTLYLQMNSLRAEDTAVYYCAKTMDYKFDYWGQGTLVTVSS

SEQ ID NO: 743 - protein, 118 aa, Homo sapiens
EVQLLESGGGLVQPGGSLRLSCTASGFTFDEYNMSWVRQAPGKGLEWVSTILPHGDRTYYADSVKGRFTISRDNSKNTLYLQMNSLRAEDTAVYYCAKQDPLYRFDYWGQGTLVTVSS

SEQ ID NO: 744 - protein, 120 aa, Homo sapiens
EVQLLESGGGLVQPGGSLRLSCAASGFTFDLYDMSWVRQAPGKGLEWVSSIVNSGVRTYYADSVKGRFTISRDNSKNTLYLQMNSLRAEDTAVYYCAKLNQSYHWDFDYWGQGTLVTVSS

SEQ ID NO: 745 - protein, 118 aa, Homo sapiens
EVQLLESGGGLVQPGGSLRLSCAASGFTFSDYRMSWVRQAPGKGLEWVSTIISNGKFTYYADSVKGRFTISRDNSKNTLYLQMNSLRAEDTAVYYCAKQDWMYMFDYWGQGTLVTVSS

SEQ ID NO: 746 - protein, 108 aa, Homo sapiens
DIQMTQSPSSLSASVGDRVTITCRASQSISSYLNWYQQKPGKAPKLLIYRNSPLQSGVPSRFSGSGSGTDFTLTISSLQPEDFATYYCQQTYRVPPTFGQGTKVEIKR

SEQ ID NO: 747 - protein, 108 aa, Homo sapiens
DIQMTQSPSSLSASVGDRVTITCRASQHIHRELRWYQQKPGKAPKLLIYQASRLQSGVPSRFSGSGSGTDFTLTISSLQPEDFATYYCQQKYLPPYTFGQGTKVEIKR

SEQ ID NO: 748 - protein, 108 aa, Homo sapiens
DIQMTQSPSSLSASVGDRVTITCRASQHIHRELRWYQQKPGKAPKLLIYQASRLQSGVPSRFSGSGSGTDFTLTISSLQPEDFATYYCQQRYRVPYTFGQGTKVEIKR

SEQ ID NO: 749 - protein, 108 aa, Homo sapiens
DIQMTQSPSSLSASVGDRVTITCRASQSIGRRLKWYQQKPGAAPRLLIYRTSWLQSGVPSRFSGSGSGTDFTLTISSLQPEDFATYYCQQTSQWPHTFGQGTKVEIKR

SEQ ID NO: 750 - protein, 108 aa, Homo sapiens
DIQMTQSPSSLSASVGDRVTITCRASQKIYKNLRWYQQKPGKAPKLLIYNSSILQSGVPSRFSGSGSGTDFTLTISSLQPEDFATYYCQQRYLSPYTFGQGTKVEIKR

SEQ ID NO: 751 - protein, 108 aa, Homo sapiens
DIQMTQSPSSLSASVGDRVTITCRASQKIYNNLRWYQQKPGKAPKLLIYNTSILQSGVPSRFSGSGSGTDFTLTISSLQPEDFATYYCQQRWRAPYTFGQGTKVEIKR

SEQ ID NO: 752 - protein, 108 aa, Homo sapiens
DIQMTQSPSSLSASVGDRVTITCRASQWIYKSLGWYQQKPGKAPKLLIYQSSLLQSGVPSRFSGSGSGTDFTLTISSLQPEDFATYYCQQYHQMPRTFGQGTKVEIKR

SEQ ID NO: 753 - protein, 108 aa, Homo sapiens
DIQMTQSPSSLSASVGDRVTITCRASQWIYRHLRWYQQKPGKAPKLLIYDASRLQSGVPTRFSGSGSGTDFTLTISSLQPEDFATYYCQQTHNPPKTFGQGTKVEIKR

SEQ ID NO: 754 - protein, 116 aa, Homo sapiens
EVQLLESGGGLVQPGGSLRLSCAASGFTFWPYTMSWVRQAPGKGLEWVSTISPFGSTTYYADSVKGRFTISRDNSKNTLYLQMNSLRAEDTAVYYCAKGGKDFDYWGQGTLVTVSS

SEQ ID NO: 755 - protein, 117 aa, Homo sapiens
EVQLLESGGGLVQPGGSLRLSCAASGFTFWPYTMSWVRQAPGKGLEWVSTISPFGSTTYYADSVKGRFTISRDNSKNTLYLQMNSLRAEDTAVYYCAKGNLEPFDYWGQGTLVTVSS

SEQ ID NO: 756 - protein, 117 aa, Homo sapiens
EVQLLESGGGLVQPGGSLRLSCAASGFTFWPYTMSWVRQAPGKGLEWVSTISPFGSTTYYADSVKGRFTISRDNSKNTLYLQMNSLRAEDTAVYYCAKKLSNGFDYWGQGTLVTVSS

SEQ ID NO: 757 - protein, 118 aa, Homo sapiens
EVQLLESGGGLVQPGGSLRLSCAASGFTFWPYTMSWVRQAPGKGLEWVSTISPFGSTTYYADSVKGRFTISRDNSKNTLYLQMNSLRAEDTAVYYCAKVVKDNTFDYWGQGTLVTVSS

SEQ ID NO: 758 - protein, 118 aa, Homo sapiens
EVQLLESGGGLVQPGGSLRLSCAASGFTFWPYTMSWVRQAPGKGLEWVSTISPFGSTTYYADSVKGRFTISRDNSKNTLYLQMNSLRAEDTAVYYCAKNTGGKQFDYWGQGTLVTVSS

SEQ ID NO: 759 - protein, 118 aa, Homo sapiens
EVQLLESGGGLVQPGGSLRLSCAASGFTFWPYTMSWVRQAPGKGLEWVSTISPFGSTTYYADSVKGRFTISRDNSKNTLYLQMNSLRAEDTAVYYCAKKTGPSSFDYWGQGTLVTVSS

SEQ ID NO: 760 - protein, 120 aa, Homo sapiens
EVQLLESGGGLVQPGGSLRLSCAASGFTFWPYTMSWVRQAPGKGLEWVSTISPFGSTTYYADSVKGRFTISRDNSKNTLYLQMNSLRAEDTAVYYCAKRTENRGVSFDYWGQGTLVTVSS

SEQ ID NO: 761 - protein, 122 aa, Homo sapiens
EVQLLESGGGLVQPGGSLRLSCAASGFTFWPYTMSWVRQAPGKGLEWVSTISPFGSTTYYADSVKGRFTISRDNSKNTLYLQMNSLRAEDTAVYYCAKSDVLKTGLDGFDYWGQGTLVTVSS

SEQ ID NO: 762 - protein, 120 aa, Homo sapiens
EVQLLESGGGLVQPGGSLRLSCAASGFTFMAYQMAWVRQAPGKGLEWVSTIHQTGFSTYYADSVKGRFTISRDNSKNTLYLQMNSLRAEDTAVYYCAKVRSMRPYKFDYWGQGTLVTVSS

SEQ ID NO: 763 - protein, 120 aa, Homo sapiens
EVQLLESGGGLVQPGGSLRLSCAASGFTFKDYDMTWVRQAPGKGLEWVSMISSSGLWTYYADSVKGRFTISRDNSKNTLYLQMNSLRAEDTAVYYCAKGFRLFPRTFDYWGQGTLVTVSS

SEQ ID NO: 764 - protein, 121 aa, Homo sapiens
EVQLLESGGGLVQPGGSLRLSCAASGFTFHDYVMGWARQAPGKGLEWVSLIKPNGSPTYYADSVKGRFTISRDNSKNTLYLQMNSLRAEDTAVYYCAKGRGRFNVLQFDYWGQGTLVTVSS

SEQ ID NO: 765 - protein, 118 aa, Homo sapiens
EVQLLESGGGLVQPGGSLRLSCTASGFTFRHYRMGWVRQAPGKGLEWVSWIRPDGTFTYYADSVKGRFTISRDNSKNTLYLQMNSLRAEDTAVYYCAKSYMGDRFDYWGQGTLVTVSS

SEQ ID NO: 766 - protein, 116 aa, Homo sapiens
EVQLLESGGGLVQPGGSLRLSCAASGFTFMWDKMGWVRQAPGKGLEWVSFIGREGYGTYYADSVKGRFTISRDNSKNTLYLQMNSLRAEDTAVYYCAKSVASFDYWGQGTLVTVSS

SEQ ID NO: 767 - protein, 117 aa, Homo sapiens
EVQLLESGGGLVQPGGSLRLSCAASGFTFWAYPMSWVRQAPGKGLEWVSSISSWGTGTYYADSVKGRFTISRDNSKNTLYLQMNSLRAEDTAVYYCAKGGQGSFDYWGQGTLVTVSS

SEQ ID NO: 768 - protein, 115 aa, Unknown
  Camelid
QVQLQESGGGLVQPGGSLRLSCEASGFTFSRFGMTWVRQAPGKGVEWVSGISSLGDSTLYADSVKGRFTISRDNAKNTLYLQMNSLKPEDTAVYYCTIGGSLNPGGQGTQVTVSS

SEQ ID NO: 769 - protein, 115 aa, Unknown
  Camelid
QVQLQESGGGLVQPGNSLRLSCAASGFTFRNFGMSWVRQAPGKEPEWVSSISGSGSNTIYADSVKDRFTISRDNAKSTLYLQMNSLKPEDTAVYYCTIGGSLSRSSQGTQVTVSS

SEQ ID NO: 770 - protein, 114 aa, Unknown
  Camelid
QVQLQESGGGLVQPGGSLRLTCTASGFTFSSFGMSWVRQAPGKGLEWVSAISSDSGTKNYADSVKGRFTISRDNAKKMLFLQMNSLRPEDTAVYYCVIGRGSPSSQGTQVTVSS

SEQ ID NO: 771 - protein, 114 aa, Unknown
  Camelid
QVQLQESGGGLVQPGGSLRLTCTASGFTFRSFGMSWVRQAPGKGLEWVSAISADGSDKRYADSVKGRFTISRDNGKKMLTLDMNSLKPEDTAVYYCVIGRGSPASQGTQVTVSS

SEQ ID NO: 772 - protein, 128 aa, Unknown
  Camelid
AVQLVESGGGLVQAGDSLRLSCVVSGTTFSSAAMGWFRQAPGKEREFVGAIKWSGTSTYYTDSVKGRFTISRDNVKNTVYLQMNNLKPEDTGVYTCAADRDRYRDRMGPMTTTDFRFWGQGTQVTVSS

SEQ ID NO: 773 - protein, 123 aa, Unknown
  Camelid
QVKLEESGGGLVQTGGSLRLSCAASGRTFSSFAMGWFRQAPGREREFVASIGSSGITTNYADSVKGRFTISRDNAKNTVYLQMNSLKPEDTGLCYCAVNRYGIPYRSGTQYQNWGQGTQVTSS

SEQ ID NO: 774 - protein, 120 aa, Unknown
  Camelid
EVQLEESGGGLVQPGGSLRLSCAASGLTFNDYAMGWYRQAPGKERDMVATISIGGRTYYADSVKGRFTISRDNAKNTVYLQMNSLKPEDTAIYYCVAHRQTVVRGPYLLWGQGTQVTVSS

SEQ ID NO: 775 - protein, 123 aa, Unknown
  Camelid
QVQLVESGGKLVQAGGSLRLSCAASGRTFSNYAMGWFRQAPGKEREFVAGSGRSNSYNYYSDSVKGRFTISRDNAKNTVYLQMNSLKPEDTAVYYCAASTNLWPRDRNLYAYWGQGTQVTVSS

SEQ ID NO: 776 - protein, 125 aa, Unknown
  Camelid
EVQLVESGGGLVQAGDSLRLSCAASGRSLGIYRMGWFRQVPGKEREFVAAISWSGGTTRYLDSVKGRFTISRDSTKNAVYLQMNSLKPEDTAVYYCAVDSSGRLYWTLSTSYDYWGQGTQVTVSS

SEQ ID NO: 777 - protein, 125 aa, Unknown
  Camelid
QVQLVEFGGGLVQAGDSLRLSCAASGRSLGIYKMAWFRQVPGKEREFVAAISWSGGTTRYIDSVKGRFTLSRDNTKNMVYLQMNSLKPDDTAVYYCAVDSSGRLYWTLSTSYDYWGQGTQVTVSS

SEQ ID NO: 778 - protein, 124 aa, Unknown
  Camelid
EVQLVESGGGLVQAGGSLSLSCAASGRTFSPYTMGWFRQAPGKEREFLAGVTWSGSSTFYGDSVKGRFTASRDSAKNTVTLEMNSLNPEDTAVYYCAAAYGGGLYRDPRSYDYWGRGTQVTVSS

SEQ ID NO: 779 - protein, 131 aa, Unknown
  Camelid
AVQLVESGGGLVQAGGSLRLSCAASGFTLDAWPIAWFRQAPGKEREGVSCIRDGTTYYADSVKGRFTISSDNANNTVYLQTNSLKPEDTAVYYCAAPSGPATGSSHTFGIYWNLRDDYDNWGQGTQVTVSS

SEQ ID NO: 780 - protein, 126 aa, Unknown
  Camelid
EVQLVESGGGLVQAGGSLRLSCAASGFTFDHYTIGWFRQVPGKEREGVSCISSSDGSTYYADSVKGRFTISSDNAKNTVYLQMNTLEPDDTAVYYCAAGGLLLRVEELQASDYDYWGQGIQVTVSS

SEQ ID NO: 781 - protein, 128 aa, Unknown
  Camelid
AVQLVDSGGGLVQPGGSLRLSCTASGFTLDYYAIGWFRQAPGKEREGVACISNSDGSTYYGDSVKGRFTISRDNAKTTVYLQMNSLKPEDTAVYYCATADRHYSASHHPFADFAFNSWGQGTQVTVSS

SEQ ID NO: 782 - protein, 120 aa, Unknown
  Camelid
EVQLVESGGGLVQAGGSLRLSCAAYGLTFWRAAMAWFRRAPGKERELVVARNWGDGSTRYADSVKGRFTISRDNAKNTVYLQMNSLKPEDTAVYYCAAVRTYGSATYDIWGQGTQVTVSS

SEQ ID NO: 783 - protein, 123 aa, Unknown
  Camelid
EVQLVESGGGLVQDGGSLRLSCIFSGRTFANYAMGWFRQAPGKEREFVAAINRNGGTTNYADALKGRFTISRDNTKNTAFLQMNSLKPDDTAVYYCAAREWPFSTIPSGWRYWGQGTQVTVSS

SEQ ID NO: 784 - protein, 125 aa, Unknown
  Camelid
DVQLVESGGGWVQPGGSLRLSCAASGPTASSHAIGWFRQAPGKEREFVVGINRGGVTRDYADSVKGRFAVSRDNVKNTVYLQMNRLKPEDSAIYICAARPEYSFTAMSKGDMDYWGKGTLVTVSS

SEQ ID NO: 785 - DNA, 1760 bp, Homo sapiens
atttctttataaaccacaactctgggcccgcaatggcagtccactgccttgctgcagtcacagaatggaaatctgcagaggcctccgcagtcacctaatcactctcctcctcttcctgttccattcagagacgatctgccgaccctctgggagaaaatccagcaagatgcaagccttcagaatctgggatgttaaccagaagaccttctatctgaggaacaaccaactagttgctggatacttgcaaggaccaaatgtcaatttagaagaaaagatagatgtggtacccattgagcctcatgctctgttcttgggaatccatggagggaagatgtgcctgtcctgtgtcaagtctggtgatgagaccagactccagctggaggcagttaacatcactgacctgagcgagaacagaaagcaggacaagcgcttcgccttcatccgctcagacagcggccccaccaccagttttgagtctgccgcctgccccggttggttcctctgcacagcgatggaagctgaccagcccgtcagcctcaccaatatgcctgacgaaggcgtcatggtcaccaaattctacttccaggaggacgagtagtactgcccaggcctgcctgttcccattcttgcatggcaaggactgcagggactgccagtccccctgccccagggctcccggctatgggggcactgaggaccagccattgaggggtggaccctcagaaggcgtcacaagaacctggtcacaggactctgcctcctcttcaactgaccagcctccatgctgcctccagaatggtctttctaatgtgtgaatcagagcacagcagcccctgcacaaagcccttccatgtcgcctctgcattcaggatcaaaccccgaccacctgcccaacctgctctcctcttgccactgcctcttcctccctcattccaccttcccatgccctggatccatcaggccacttgatgacccccaaccaagtggctcccacaccctgttttacaaaaaagaaaagaccagtccatgagggaggtttttaagggtttgtggaaaatgaaaattaggatttcatgatttttttttttcagtccccgtgaaggagagcccttcatttggagattatgttctttcggggagaggctgaggacttaaaatattcctgcatttgtgaaatgatggtgaaagtaagtggtagcttttcccttctttttcttctttttttgtgatgtcccaacttgtaaaaattaaaagttatggtactatgttagccccataattttttttttccttttaaaacacttccataatctggactcctctgtccaggcactgctgcccagcctccaagctccatctccactccagattttttacagctgcctgcagtactttacctcctatcagaagtttctcagctcccaaggctctgagcaaatgtggctcctgggggttctttcttcctctgctgaaggaataaattgctccttgacattgtagagcttctggcacttggagacttgtatgaaagatggctgtgcctctgcctgtctcccccaccgggctgggagctctgcagagcaggaaacatgactcgtatatgtctcaggtccctgcagggccaagcacctagcctcgctcttggcaggtactcagcgaatgaatgctgtatatgttgggtgcaaagttccctacttcctgtgacttcagctctgttttacaataaaatcttgaaaatgcctaaaaaaaaaaaaaaaaaa

SEQ ID NO: 786 - protein, 177 aa, Homo sapiens
MEICRGLRSHLITLLLFLFHSETICRPSGRKSSKMQAFRIWDVNQKTFYLRNNQLVAGYLQGPNVNLEEKIDVVPIEPHALFLGIHGGKMCLSCVKSGDETRLQLEAVNITDLSENRKQDKRFAFIRSDSGPTTSFESAACPGWFLCTAMEADQPVSLTNMPDEGVMVTKFYFQEDE

SEQ ID NO: 787 - protein, 288 aa, Homo sapiens
RPSGRKSSKMQAFRIWDVNQKTFYLRNNQLVAGYLQGPNVNLEEKIDVVPIEPHALFLGIHGGKMCLSCVKSGDETRLQLEAVNITDLSENRKQDKRFAFIRSDSGPTTSFESAACPGWFLCTAMEADQPVSLTNMPDEGVMVTKFYFQEDESSGGGGSGGGGSGGGGSGGGGSGGGGSTDIQMTQSPSSLSASVGDRVTITCRASQSIIKHLKWYQQKPGKAPKLLIYGASRLQSGVPSRFSGSGSGTDFTLTISSLQPEDFATYYCQQGARWPQTFGQGTKVEIKR

What is claimed is:

1. Use of an antagonist of Interleukin-1 Receptor Type 1 (IL-1R1) for the manufacture of a medicament for treating a respiratory disease, wherein said antagonist of IL-1R1 comprises a polypeptide domain that has binding specificity for Interleukin-1 Receptor Type 1 (IL-1R1) and inhibits binding of Interleukin-1 (IL-1) to IL-1R1, and wherein said polypeptide domain that has binding specificity for IL-1R1 is provided by an antibody or antigen-binding fragment thereof, Interleukin-1 receptor antagonist (IL-1ra) or a functional variant of IL-1ra.

2. The use of claim 1, wherein said polypeptide domain that has binding specificity for IL-1R1 inhibits binding of IL-1 to IL-1R1 with an IC50 that is ≦1 μM.

3. The use of claim 1, wherein said polypeptide domain that has binding specificity for IL-1R1 inhibits IL-1-induced release of Interleukin-8 by MRC-5 cells (ATCC Accession No. CCL-171) in an in vitro assay with a ND50 that is ≦1 μM.

4. The use of claim 4, wherein said polypeptide domain that has binding specificity for IL-1R1 inhibits IL-1-induced release of Interleukin-8 by MRC-5 cells (ATCC Accession No. CCL-171) in an in vitro assay with a ND50 that is ≦1 nM.

5. The use of claim 1, wherein said polypeptide domain that has binding specificity for IL-1R1 inhibits IL-1-induced release of Interleukin-6 in a whole blood assay with a ND50 that is ≦1 μM.

6. The use of any one of claims 1-5, wherein said polypeptide domain that has binding specificity for IL-1R1 is an antigen-binding fragment of an antibody, and said antigen-binding fragment is an immunoglobulin single variable domain.

7. The use of claim 6, wherein one or more of the framework regions (FR) in said immunoglobulin single variable domain comprise (a) the amino acid sequence of a human framework region, (b) at least 8 contiguous amino acids of the amino acid sequence of a human framework region, or (c) an amino acid sequence encoded by a human germline antibody gene segment, wherein said framework regions are as defined by Kabat.

8. The use of claim 6, wherein the amino acid sequences of one or more framework regions in said immunoglobulin single variable domain are the same as the amino acid sequence of a corresponding framework region encoded by a human germline antibody gene segment, or the amino acid sequences of one or more of said framework regions collectively comprise up to 5 amino acid differences relative to the corresponding framework regions encoded by a human germline antibody gene segment.

9. The use of claim 6, wherein the amino acid sequences of FR1, FR2, FR3 and FR4 in said immunoglobulin single variable domain are the same as the amino acid sequences of corresponding framework regions encoded by a human germline antibody gene segment, or the amino acid sequences of FR1, FR2, FR3 and FR4 collectively contain up to 10 amino acid differences relative to the corresponding framework regions encoded by a human germline antibody gene segment.

10. The use of claim 6, wherein the immunoglobulin single variable domain comprises FR1, FR2 and FR3 regions, and the amino acid sequence of said FR1, FR2 and FR3 are the same as the amino acid sequences of corresponding framework regions encoded by a human germline antibody gene segment.

11. The use of any one of claims 7-10, wherein said human germline antibody gene segment comprises is DPK9 and JK1.

12. The use of any one of claims 6-11, wherein said immunoglobulin single variable domain competes for binding to IL-1R1 with an immunoglobulin single variable domain selected from the group consisting of DOM4-122-23 (SEQ ID NO:1), DOM4-122-24 (SEQ ID NO:2), DOM4-130-30 (SEQ ID NO:3), DOM4-130-46 (SEQ ID NO:4), DOM4-130-51 (SEQ ID NO:5), DOM4-130-53 (SEQ ID NO:6), DOM4-130-54 (SEQ ID NO:7), DOM4-1 (SEQ ID NO:8), DOM4-2 (SEQ ID NO:9), DOM4-3 (SEQ ID NO:10), DOM4-4 (SEQ ID NO:11), DOM4-5 (SEQ ID NO:12), DOM4-6 (SEQ ID NO:13), DOM4-7 (SEQ ID NO:14), DOM4-8 (SEQ ID NO:15), DOM4-9 (SEQ ID NO:16), DOM4-10 (SEQ ID NO:17), DOM4-11 (SEQ ID NO:18), DOM4-12 (SEQ ID NO:19), DOM4-13 (SEQ ID NO:20), DOM4-14 (SEQ ID NO:21), DOM4-15 (SEQ ID NO:22), DOM4-20 (SEQ ID NO:23), DOM4-21 (SEQ ID NO:24), DOM4-22 (SEQ ID NO:25), DOM4-23 (SEQ ID NO:26), DOM4-25 (SEQ ID NO:27), DOM4-26 (SEQ ID NO:28), DOM4-27 (SEQ ID NO:29), DOM4-28 (SEQ ID NO:30), DOM4-29 (SEQ ID NO:31), DOM4-31 (SEQ ID NO:32), DOM4-32 (SEQ ID NO:33), DOM4-33 (SEQ ID NO:34), DOM4-34 (SEQ ID NO:35), DOM4-36 (SEQ ID NO:36), DOM4-37 (SEQ ID NO:37), DOM4-38 (SEQ ID NO:38), DOM4-39 (SEQ ID NO:39), DOM4-40 (SEQ ID NO:40), DOM4-41 (SEQ ID NO:41), DOM4-42 (SEQ ID NO:42), DOM4-44 (SEQ ID NO:43), DOM4-45 (SEQ ID NO:44), DOM4-46 (SEQ ID NO:45), DOM4-49 (SEQ ID NO:46), DOM4-50 (SEQ ID NO:47), DOM4-74 (SEQ ID NO:48), DOM4-75 (SEQ ID NO:49), DOM4-76 (SEQ ID NO:50), DOM4-78 (SEQ ID NO:51), DOM4-79 (SEQ ID NO:52), DOM4-80 (SEQ ID NO:53), DOM4-81 (SEQ ID NO:54), DOM4-82 (SEQ ID NO:55), DOM4-83 (SEQ ID NO:56), DOM4-84 (SEQ ID NO:57), DOM4-85 (SEQ ID NO:58), DOM4-86 (SEQ ID NO:59), DOM4-87 (SEQ ID NO:60), DOM4-88 (SEQ ID NO:61), DOM4-89 (SEQ ID NO:62), DOM4-90 (SEQ ID NO:63), DOM4-91 (SEQ ID NO:64), DOM4-92 (SEQ ID NO:65), DOM4-93 (SEQ ID NO:66), DOM4-94 (SEQ ID NO:67), DOM4-95 (SEQ ID NO:68), DOM4-96 (SEQ ID NO:69), DOM4-97 (SEQ ID NO:70), DOM4-98 (SEQ ID NO:71), DOM4-99 (SEQ ID NO:72), DOM4-100 (SEQ ID NO:73), DOM4-101 (SEQ ID NO:74), DOM4-102 (SEQ ID NO:75), DOM4-103 (SEQ ID NO:76), DOM4-104 (SEQ ID NO:77), DOM4-105 (SEQ ID NO:78), DOM4-106 (SEQ ID NO:79), DOM4-107 (SEQ ID NO:80), DOM4-108 (SEQ ID NO:81), DOM4-109 (SEQ ID NO:82), DOM4-110 (SEQ ID NO:83), DOM4-111 (SEQ ID NO:84), DOM4-112 (SEQ ID NO:85), DOM4-113 (SEQ ID NO:86), DOM4-114 (SEQ ID NO:87), DOM4-115 (SEQ ID NO:88), DOM4-116 (SEQ ID NO:89), DOM4-117 (SEQ ID NO:90), DOM4-118 (SEQ ID NO:91), DOM4-119 (SEQ ID NO:92), DOM4-120 (SEQ ID NO:93), DOM4-121 (SEQ ID NO:94), DOM4-122 (SEQ ID NO:95), DOM4-122-1 (SEQ ID NO:96), DOM4-122-2 (SEQ ID NO:97), DOM4-122-3 (SEQ ID NO:98), DOM4-122-4 (SEQ ID NO:99), DOM4-122-5 (SEQ ID NO:100), DOM4-122-6 (SEQ ID NO:101), DOM4-122-7 (SEQ ID NO:102), DOM4-122-8 (SEQ ID NO: 103), DOM4-122-9 (SEQ ID NO:104), DOM4-122-10 (SEQ ID NO:105), DOM4-122-11 (SEQ ID NO:106), DOM4-122-12 (SEQ ID NO:107), DOM4-122-13 (SEQ ID NO:108), DOM4-122-14 (SEQ ID NO:109), DOM4-122-15 (SEQ ID NO:110), DOM4-122-16 (SEQ ID NO:111), DOM4-122-17 (SEQ ID NO:112), DOM4-122-18 (SEQ ID NO:113), DOM4-122-19 (SEQ ID NO:114), DOM4-122-20 (SEQ ID NO:115), DOM4-122-21 (SEQ ID NO:116), DOM4-122-22 (SEQ ID NO:117), DOM4-122-25 (SEQ ID NO:118), DOM4-122-26 (SEQ ID NO:119), DOM4-122-27 (SEQ ID NO:120), DOM4-122-28 (SEQ ID NO:121), DOM4-122-29 (SEQ ID NO:122), DOM4-122-30 (SEQ ID NO:123), DOM4-122-31 (SEQ ID NO:124), DOM4-122-32 (SEQ ID NO:125), DOM4-122-33 (SEQ ID NO:126), DOM4-122-34 (SEQ ID NO:127), DOM4-122-35 (SEQ ID NO:128), DOM4-122-36 (SEQ ID NO:129), DOM4-122-37 (SEQ ID NO:130), DOM4-122-38 (SEQ ID NO:131), DOM4-122-39 (SEQ ID NO:132), DOM4-122-40 (SEQ ID NO:133), DOM4-122-41 (SEQ ID NO:134), DOM4-122-42 (SEQ ID NO:135), DOM4-122-43 (SEQ ID NO:136), DOM4-122-44 (SEQ ID NO:137), DOM4-122-45 (SEQ ID NO:138), DOM4-122-46 (SEQ ID NO:139), DOM4-122-47 (SEQ ID NO:140), DOM4-122-48 (SEQ ID NO:141), DOM4-122-49 (SEQ ID NO:142), DOM4-122-50 (SEQ ID NO:143), DOM4-122-51 (SEQ ID NO:144), DOM4-122-52 (SEQ ID NO:145), DOM4-122-54 (SEQ ID NO:146), DOM4-122-55 (SEQ ID NO:147), DOM4-122-56 (SEQ ID NO:148), DOM4-122-57 (SEQ ID NO:149), DOM4-122-58 (SEQ ID NO:150), DOM4-122-59 (SEQ ID NO:151), DOM4-122-60 (SEQ ID NO:152), DOM4-122-61 (SEQ ID NO:153), DOM4-122-62 (SEQ ID NO:154), DOM4-122-63 (SEQ ID NO:155), DOM4-122-64 (SEQ ID NO:156), DOM4-122-65 (SEQ ID NO:157), DOM4-122-66 (SEQ ID NO:158), DOM4-122-67 (SEQ ID NO:159), DOM4-122-68 (SEQ ID NO:160), DOM4-122-69 (SEQ ID NO:161), DOM4-122-70 (SEQ ID NO:162), DOM4-122-71 (SEQ ID NO:163), DOM4-122-72 (SEQ ID NO:164), DOM4-122-73 (SEQ ID NO:165), DOM4-123 (SEQ ID NO:166), DOM4-124 (SEQ ID NO:167) DOM4-125 (SEQ ID NO:168), DOM4-126 (SEQ ID NO:169), DOM4-127 (SEQ ID NO:170), DOM4-128 (SEQ ID NO:171), DOM4-129 (SEQ ID NO:172), DOM4-129-1 (SEQ ID NO:173) DOM4-129-2 (SEQ ID NO:174), DOM4-129-3 (SEQ ID NO:175), DOM4-129-4 (SEQ ID NO:176), DOM4-129-5 (SEQ ID NO:177), DOM4-129-6 (SEQ ID NO:178), DOM4-129-7 (SEQ ID NO:179), DOM4-129-8 (SEQ ID NO:180), DOM4-129-9 (SEQ ID NO:181), DOM4-129-10 (SEQ ID NO: 182), DOM4-129-11 (SEQ ID NO:183), DOM4-129-12 (SEQ ID NO:184), DOM4-129-13 (SEQ ID NO:185), DOM4-129-14 (SEQ ID NO:186), DOM4-129-15 (SEQ ID NO:187), DOM4-129-16 (SEQ ID NO:188), DOM4-129-17 (SEQ ID NO:189), DOM4-129-18 (SEQ ID NO:190), DOM4-129-19 (SEQ ID NO:191), DOM4-129-20 (SEQ ID NO:192), DOM4-129-21 (SEQ ID NO:193), DOM4-129-22 (SEQ ID NO:194), DOM4-129-23 (SEQ ID NO:195), DOM4-129-24 (SEQ ID NO:196), DOM4-129-25 (SEQ ID NO:197), DOM4-129-26 (SEQ ID NO:198), DOM4-129-27 (SEQ ID NO:199), DOM4-129-28 (SEQ ID NO:200), DOM4-129-29 (SEQ ID NO:201), DOM4-129-31 (SEQ ID NO:202), DOM4-129-32 (SEQ ID NO:203), DOM4-129-33 (SEQ ID NO:204), DOM4-129-34 (SEQ ID NO:205), DOM4-129-35 (SEQ ID NO:206), DOM4-129-37 (SEQ ID NO:207), DOM4-129-38 (SEQ ID NO:208), DOM4-129-39 (SEQ ID NO:209), DOM4-129-40 (SEQ ID NO:210), DOM4-129-41 (SEQ ID NO:211), DOM4-129-42 (SEQ ID NO:212), DOM4-129-43 (SEQ ID NO:213), DOM4-129-44 (SEQ ID NO:214), DOM4-130 (SEQ ID NO:215), DOM4-130-1 (SEQ ID NO:216), DOM4-130-2 (SEQ ID NO:217), DOM4-130-3 (SEQ ID NO:218), DOM4-130-4 (SEQ ID NO:219), DOM4-130-5 (SEQ ID NO:220), DOM4-130-6 (SEQ ID NO:221), DOM4-130-7 (SEQ ID NO:222), DOM4-130-8 (SEQ ID NO:223), DOM4-130-9 (SEQ ID NO:224), DOM4-130-10 (SEQ ID NO:225), DOM4-130-11 (SEQ ID NO:226), DOM4-130-12 (SEQ ID NO:227), DOM4-130-13 (SEQ ID NO:228), DOM4-130-14 (SEQ ID NO:229), DOM4-130-15 (SEQ ID NO:230), DOM4-130-16 (SEQ ID NO:231), DOM4-130-17 (SEQ ID NO:232), DOM4-130-18 (SEQ ID NO:233), DOM4-130-19 (SEQ ID NO:234), DOM4-130-20 (SEQ ID NO:235), DOM4-130-21 (SEQ ID NO:236), DOM4-130-22 (SEQ ID NO:237), DOM4-130-23 (SEQ ID NO:238), DOM4-130-24 (SEQ ID NO:239), DOM4-130-25 (SEQ ID NO:240), DOM4-130-26 (SEQ ID NO:241), DOM4-130-27 (SEQ ID NO:242), DOM4-130-28 (SEQ ID NO:243), DOM4-130-31 (SEQ ID NO:244), DOM4-130-32 (SEQ ID NO:245), DOM4-130-33 (SEQ ID NO:246), DOM4-130-34 (SEQ ID NO:247), DOM4-130-35 (SEQ ID NO:248), DOM4-130-36 (SEQ ID NO:249), DOM4-130-37 (SEQ ID NO:250), DOM4-130-38 (SEQ ID NO:251), DOM4-130-39 (SEQ ID NO:252), DOM4-130-40 (SEQ ID NO:253), DOM4-130-41 (SEQ ID NO:254), DOM4-130-42 (SEQ ID NO:255), DOM4-130-43 (SEQ ID NO:256), DOM4-130-44 (SEQ ID NO:257), DOM4-130-45 (SEQ ID NO:258), DOM4-130-46 (SEQ ID NO:259), DOM4-130-47 (SEQ ID NO:260), DOM4-130-48 (SEQ ID NO:261), DOM4-130-49 (SEQ ID NO:262), DOM4-130-50 (SEQ ID NO:263), DOM4-130-51 (SEQ ID NO:264), DOM4-130-52 (SEQ ID NO:265), DOM4-130-53 (SEQ ID NO:266), DOM4-130-54 (SEQ ID NO:267), DOM4-130-55 (SEQ ID NO:268), DOM4-130-56 (SEQ ID NO:269), DOM4-130-57 (SEQ ID NO:270), DOM4-130-58 (SEQ ID NO:271), DOM4-130-59 (SEQ ID NO:272), DOM4-130-60 (SEQ ID NO:273), DOM4-130-61 (SEQ ID NO:274), DOM4-130-62 (SEQ ID NO:275), DOM4-130-63 (SEQ ID NO:276), DOM4-130-64 (SEQ ID NO:277), DOM4-130-65 (SEQ ID NO:278), DOM4-130-66 (SEQ ID NO:279), DOM4-130-67 (SEQ ID NO:280), DOM4-130-68 (SEQ ID NO:281), DOM4-130-69 (SEQ ID NO:282), DOM4-130-70 (SEQ ID NO:283), DOM4-130-71 (SEQ ID NO:284), DOM4-130-72 (SEQ ID NO:285), DOM4-130-73 (SEQ ID NO:286), DOM4-130-74 (SEQ ID NO:287), DOM4-130-75 (SEQ ID NO:288), DOM4-130-76 (SEQ ID NO:289), DOM4-130-77 (SEQ ID NO:290), DOM4-130-78 (SEQ ID NO:291), DOM4-130-79 (SEQ ID NO:292), DOM4-130-80 (SEQ ID NO:293), DOM4-130-81 (SEQ ID NO:294), DOM4-130-82 (SEQ ID NO:295), DOM4-130-83 (SEQ ID NO:296), DOM4-130-84 (SEQ ID NO:297), DOM4-130-85 (SEQ ID NO:298), DOM4-130-86 (SEQ ID NO:299), DOM4-130-87 (SEQ ID NO:300), DOM4-130-88 (SEQ ID NO:301), DOM4-130-89 (SEQ ID NO:302), DOM4-130-90 (SEQ ID NO:303), DOM4-130-91 (SEQ ID NO:304), DOM4-130-92 (SEQ ID NO:305), DOM4-130-93 (SEQ ID NO:306), DOM4-130-94 (SEQ ID NO:307), DOM4-130-95 (SEQ ID NO:308), DOM4-130-96 (SEQ ID NO:309), DOM4-130-97 (SEQ ID NO:310), DOM4-130-98 (SEQ ID NO:311), DOM4-130-99 (SEQ ID NO:312), DOM4-130-100 (SEQ ID NO:313), DOM4-130-101 (SEQ ID NO:314), DOM4-130-102 (SEQ ID NO:315), DOM4-130-103 (SEQ ID NO:316), DOM4-130-104 (SEQ ID NO:317), DOM4-130-105 (SEQ ID NO:318), DOM4-130-106 (SEQ ID NO:319), DOM4-130-107 (SEQ ID NO:320), DOM4-130-108 (SEQ ID NO:321), DOM4-130-109 (SEQ ID NO:322), DOM4-130-110 (SEQ ID NO:323), DOM4-130-111 (SEQ ID NO:324), DOM4-130-112 (SEQ ID NO:325), DOM4-130-113 (SEQ ID NO:326), DOM4-130-114 (SEQ ID NO:327), DOM4-130-115 (SEQ ID NO:328), DOM4-130-116 (SEQ ID NO:329), DOM4-130-117 (SEQ ID NO:330), DOM4-130-118 (SEQ ID NO:331), DOM4-130-119 (SEQ ID NO:332), DOM4-130-120 (SEQ ID NO:333), DOM4-130-121 (SEQ ID NO:334), DOM4-130-122 (SEQ ID NO:335), DOM4-130-123 (SEQ ID NO:336), DOM4-130-124 (SEQ ID NO:337), DOM4-130-125 (SEQ ID NO:338), DOM4-130-126 (SEQ ID NO:339), DOM4-130-127 (SEQ ID NO:340), DOM4-130-128 (SEQ ID NO:341), DOM4-130-129 (SEQ ID NO:342), DOM4-130-130 (SEQ ID NO:343), DOM4-130-131 (SEQ ID NO:344), DOM4-130-132 (SEQ ID NO:345), DOM4-130-133 (SEQ ID NO:346), DOM4-131 (SEQ ID NO:347), DOM4-132 (SEQ ID NO:348), and DOM4-133 (SEQ ID NO:349).

13. The use of claim 12, wherein said immunoglobulin single variable domain comprises an amino acid sequence that has at least about 90% amino acid sequence identity with an amino acid sequence selected from the group consisting of DOM4-122-23 (SEQ ID NO:1), DOM4-122-24 (SEQ ID NO:2), DOM4-130-30 (SEQ ID NO:3), DOM4-130-46 (SEQ ID NO:4), DOM4-130-51 (SEQ ID NO:5), DOM4-130-53 (SEQ ID NO:6), DOM4-130-54 (SEQ ID NO:7), DOM4-1 (SEQ ID NO:8), DOM4-2 (SEQ ID NO:9), DOM4-3 (SEQ ID NO:10), DOM4-4 (SEQ ID NO:11), DOM4-5 (SEQ ID NO:12), DOM4-6 (SEQ ID NO:13), DOM4-7 (SEQ ID NO:14), DOM4-8 (SEQ ID NO:15), DOM4-9 (SEQ ID NO:16), DOM4-10 (SEQ ID NO:17), DOM4-11 (SEQ ID NO:18), DOM4-12 (SEQ ID NO:19), DOM4-13 (SEQ ID NO:20), DOM4-14 (SEQ ID NO:21), DOM4-15 (SEQ ID NO:22), DOM4-20 (SEQ ID NO:23), DOM4-21 (SEQ ID NO:24), DOM4-22 (SEQ ID NO:25), DOM4-23 (SEQ ID NO:26), DOM4-25 (SEQ ID NO:27), DOM4-26 (SEQ ID NO:28), DOM4-27 (SEQ ID NO:29), DOM4-28 (SEQ ID NO:30), DOM4-29 (SEQ ID NO:31), DOM4-31 (SEQ ID NO:32), DOM4-32 (SEQ ID NO:33), DOM4-33 (SEQ ID NO:34), DOM4-34 (SEQ ID NO:35), DOM4-36 (SEQ ID NO:36), DOM4-37 (SEQ ID NO:37), DOM4-38 (SEQ ID NO:38), DOM4-39 (SEQ ID NO:39), DOM4-40 (SEQ ID NO:40), DOM4-41 (SEQ ID NO:41), DOM4-42 (SEQ ID NO:42), DOM4-44 (SEQ ID NO:43), DOM4-45 (SEQ ID NO:44), DOM4-46 (SEQ ID NO:45), DOM4-49 (SEQ ID NO:46), DOM4-50 (SEQ ID NO:47), DOM4-74 (SEQ ID NO:48), DOM4-75 (SEQ ID NO:49), DOM4-76 (SEQ ID NO:50), DOM4-78 (SEQ ID NO:51), DOM4-79 (SEQ ID NO:52), DOM4-80 (SEQ ID NO:53), DOM4-81 (SEQ ID NO:54), DOM4-82 (SEQ ID NO:55), DOM4-83 (SEQ ID NO:56), DOM4-84 (SEQ ID NO:57), DOM4-85 (SEQ ID NO:58), DOM4-86 (SEQ ID NO:59), DOM4-87 (SEQ ID NO:60), DOM4-88 (SEQ ID NO:61), DOM4-89 (SEQ ID NO:62), DOM4-90 (SEQ ID NO:63), DOM4-91 (SEQ ID NO:64), DOM4-92 (SEQ ID NO:65), DOM4-93 (SEQ ID NO:66), DOM4-94 (SEQ ID NO:67), DOM4-95 (SEQ ID NO:68), DOM4-96 (SEQ ID NO:69), DOM4-97 (SEQ ID NO:70), DOM4-98 (SEQ ID NO:71), DOM4-99 (SEQ ID NO:72), DOM4-100 (SEQ ID NO:73), DOM4-101 (SEQ ID NO:74), DOM4-102 (SEQ ID NO:75), DOM4-103 (SEQ ID NO:76), DOM4-104 (SEQ ID NO:77), DOM4-105 (SEQ ID NO:78), DOM4-106 (SEQ ID NO:79), DOM4-107 (SEQ ID NO:80), DOM4-108 (SEQ ID NO:81), DOM4-109 (SEQ ID NO:82), DOM4-110 (SEQ ID NO:83), DOM4-111 (SEQ ID NO:84), DOM4-112 (SEQ ID NO:85), DOM4-113 (SEQ ID NO:86), DOM4-114 (SEQ ID NO:87), DOM4-115 (SEQ ID NO:88), DOM4-116 (SEQ ID NO:89), DOM4-117 (SEQ ID NO:90), DOM4-118 (SEQ ID NO:91), DOM4-119 (SEQ ID NO:92), DOM4-120 (SEQ ID NO:93), DOM4-121 (SEQ ID NO:94), DOM4-122 (SEQ ID NO:95), DOM4-122-1 (SEQ ID NO:96), DOM4-122-2 (SEQ ID NO:97), DOM4-122-3 (SEQ ID NO:98), DOM4-122-4 (SEQ ID NO:99), DOM4-122-5 (SEQ ID NO:100), DOM4-122-6 (SEQ ID NO:101), DOM4-122-7 (SEQ ID NO:102), DOM4-122-8 (SEQ ID NO:103), DOM4-122-9 (SEQ ID NO:104), DOM4-122-10 (SEQ ID NO:105), DOM4-122-11 (SEQ ID NO:106), DOM4-122-12 (SEQ ID NO:107), DOM4-122-13 (SEQ ID NO:108), DOM4-122-14 (SEQ ID NO:109), DOM4-122-15 (SEQ ID NO:110), DOM4-122-16 (SEQ ID NO:111), DOM4-122-17 (SEQ ID NO:112), DOM4-122-18 (SEQ ID NO:13), DOM4-122-19 (SEQ ID NO:114), DOM4-122-20 (SEQ ID NO:115), DOM4-122-21 (SEQ ID NO:116), DOM4-122-22 (SEQ ID NO:117), DOM4-122-25 (SEQ ID NO:118), DOM4-122-26 (SEQ ID NO:119), DOM4-122-27 (SEQ ID NO:120), DOM4-122-28 (SEQ ID NO:121), DOM4-122-29 (SEQ ID NO:122), DOM4-122-30 (SEQ ID NO:123), DOM4-122-31 (SEQ ID NO:124), DOM4-122-32 (SEQ ID NO:125), DOM4-122-33 (SEQ ID NO:126), DOM4-122-34 (SEQ ID NO:127), DOM4-122-35 (SEQ ID NO:128), DOM4-122-36 (SEQ ID NO:129), DOM4-122-37 (SEQ ID NO:130), DOM4-122-38 (SEQ ID NO:131), DOM4-122-39 (SEQ ID NO:132), DOM4-122-40 (SEQ ID NO:133), DOM4-122-41 (SEQ ID NO:134), DOM4-122-42 (SEQ ID NO:135), DOM4-122-43 (SEQ ID NO:136), DOM4-122-44 (SEQ ID NO:137), DOM4-122-45 (SEQ ID NO:138), DOM4-122-46 (SEQ ID NO:139), DOM4-122-47 (SEQ ID NO:140), DOM4-122-48 (SEQ ID NO:141), DOM4-122-49 (SEQ ID NO:142), DOM4-122-50 (SEQ ID NO:143), DOM4-122-51 (SEQ ID NO:144), DOM4-122-52 (SEQ ID NO:145), DOM4-122-54 (SEQ ID NO:146), DOM4-122-55 (SEQ ID NO:147), DOM4-122-56 (SEQ ID NO:148), DOM4-122-57 (SEQ ID NO:149), DOM4-122-58 (SEQ ID NO:150), DOM4-122-59 (SEQ ID NO:151), DOM4-122-60 (SEQ ID NO:152), DOM4-122-61 (SEQ ID NO:153), DOM4-122-62 (SEQ ID NO:154), DOM4-122-63 (SEQ ID NO:155), DOM4-122-64 (SEQ ID NO:156), DOM4-122-65 (SEQ ID NO:157), DOM4-122-66 (SEQ ID NO:158), DOM4-122-67 (SEQ ID NO:159), DOM4-122-68 (SEQ ID NO:160), DOM4-122-69 (SEQ ID NO:161), DOM4-122-70 (SEQ ID NO:162), DOM4-122-71 (SEQ ID NO:163), DOM4-122-72 (SEQ ID NO:164), DOM4-122-73 (SEQ ID NO:165), DOM4-123 (SEQ ID NO:166), DOM4-124 (SEQ ID NO:167) DOM4-125 (SEQ ID NO:168), DOM4-126 (SEQ ID NO:169), DOM4-127 (SEQ ID NO:170), DOM4-128 (SEQ ID NO:171), DOM4-129 (SEQ ID NO:172), DOM4-129-1 (SEQ ID NO:173), DOM4-129-2 (SEQ ID NO:174), DOM4-129-3 (SEQ ID NO:175), DOM4-129-4 (SEQ ID NO:176), DOM4-129-5 (SEQ ID NO:177), DOM4-129-6 (SEQ ID NO:178), DOM4-129-7 (SEQ ID NO:179), DOM4-129-8 (SEQ ID NO:180), DOM4-129-9 (SEQ ID NO:181), DOM4-129-10 (SEQ ID NO:182), DOM4-129-11 (SEQ ID NO:183), DOM4-129-12 (SEQ ID NO:184), DOM4-129-13 (SEQ ID NO:185), DOM4-129-14 (SEQ ID NO:186), DOM4-129-15 (SEQ ID NO:187), DOM4-1129-16 (SEQ ID NO:188), DOM4-129-17 (SEQ ID NO:189), DOM4-129-18 (SEQ ID NO:190), DOM4-129-19 (SEQ ID NO:191), DOM4-129-20 (SEQ ID NO:192), DOM4-129-21 (SEQ ID NO:193), DOM4-129-22 (SEQ ID NO:194), DOM4-129-23 (SEQ ID NO:195), DOM4-129-24 (SEQ ID NO:196), DOM4-129-25 (SEQ ID NO:197), DOM4-129-26 (SEQ ID NO:198), DOM4-129-27 (SEQ ID NO:199), DOM4-129-28 (SEQ ID NO:200), DOM4-129-29 (SEQ ID NO:201), DOM4-129-31 (SEQ ID NO:202), DOM4-129-32 (SEQ ID NO:203), DOM4-129-33 (SEQ ID NO:204), DOM4-129-34 (SEQ ID NO:205), DOM4-129-35 (SEQ ID NO:206), DOM4-129-37 (SEQ ID NO:207), DOM4-129-38 (SEQ ID NO:208), DOM4-129-39 (SEQ ID NO:209), DOM4-129-40 (SEQ ID NO:210), DOM4-129-41 (SEQ ID NO:211), DOM4-129-42 (SEQ ID NO:212), DOM4-129-43 (SEQ ID NO:213), DOM4-129-44 (SEQ ID NO:214), DOM4-130 (SEQ ID NO:215), DOM4-130-1 (SEQ ID NO:216), DOM4-130-2 (SEQ ID NO:217), DOM4-130-3 (SEQ ID NO:218), DOM4-130-4 (SEQ ID NO:219), DOM4-130-5 (SEQ ID NO:220), DOM4-130-6 (SEQ ID NO:221), DOM4-130-7 (SEQ ID NO:222), DOM4-130-8 (SEQ ID NO:223), DOM4-130-9 (SEQ ID NO:224), DOM4-130-10 (SEQ ID NO:225), DOM4-130-11 (SEQ ID NO:226), DOM4-130-12 (SEQ ID NO:227), DOM4-130-13 (SEQ ID NO:228), DOM4-130-14 (SEQ ID NO:229), DOM4-130-15 (SEQ ID NO:230), DOM4-130-16 (SEQ ID NO:231), DOM4-130-17 (SEQ ID NO:232), DOM4-130-18 (SEQ ID NO:233), DOM4-130-19 (SEQ ID NO:234), DOM4-130-20 (SEQ ID NO:235), DOM4-130-21 (SEQ ID NO:236), DOM4-130-22 (SEQ ID NO:237), DOM4-130-23 (SEQ ID NO:238), DOM4-130-24 (SEQ ID NO:239), DOM4-130-25 (SEQ ID NO:240), DOM4-130-26 (SEQ ID NO:241), DOM4-130-27 (SEQ ID NO:242), DOM4-130-28 (SEQ ID NO:243), DOM4-130-31 (SEQ ID NO:244), DOM4-130-32 (SEQ ID NO:245), DOM4-130-33 (SEQ ID NO:246), DOM4-130-34 (SEQ ID NO:247), DOM4-130-35 (SEQ ID NO:248), DOM4-130-36 (SEQ ID NO:249), DOM4-130-37 (SEQ ID NO:250), DOM4-130-38 (SEQ ID NO:251), DOM4-130-39 (SEQ ID NO:252), DOM4-130-40 (SEQ ID NO:253), DOM4-130-41 (SEQ ID NO:254), DOM4-130-42 (SEQ ID NO:255), DOM4-130-43 (SEQ ID NO:256), DOM4-130-44 (SEQ ID NO:257), DOM4-130-45 (SEQ ID NO:258), DOM4-130-46 (SEQ ID NO:259), DOM4-130-47 (SEQ ID NO:260), DOM4-130-48 (SEQ ID NO:261), DOM4-130-49 (SEQ ID NO:262), DOM4-130-50 (SEQ ID NO:263), DOM4-130-51 (SEQ ID NO:264), DOM4-130-52 (SEQ ID NO:265), DOM4-130-53 (SEQ ID NO:266), DOM4-130-54 (SEQ ID NO:267), DOM4-130-55 (SEQ ID NO:268), DOM4-130-56 (SEQ ID NO:269), DOM4-130-57 (SEQ ID NO:270), DOM4-130-58 (SEQ ID NO:271), DOM4-130-59 (SEQ ID NO:272), DOM4-130-60 (SEQ ID NO:273), DOM4-130-61 (SEQ ID NO:274), DOM4-130-62 (SEQ ID NO:275), DOM4-130-63 (SEQ ID NO:276), DOM4-130-64 (SEQ ID NO:277), DOM4-130-65 (SEQ ID NO:278), DOM4-130-66 (SEQ ID NO:279), DOM4-130-67 (SEQ ID NO:280), DOM4-130-68 (SEQ ID NO:281), DOM4-130-69 (SEQ ID NO:282), DOM4-130-70 (SEQ ID NO:283), DOM4-130-71 (SEQ ID NO:284), DOM4-130-72 (SEQ ID NO:285), DOM4-130-73 (SEQ ID NO:286), DOM4-130-74 (SEQ ID NO:287), DOM4-130-75 (SEQ ID NO:288), DOM4-130-76 (SEQ ID NO:289), DOM4-130-77 (SEQ ID NO:290), DOM4-130-78 (SEQ ID NO:291), DOM4-130-79 (SEQ ID NO:292), DOM4-130-80 (SEQ ID NO:293), DOM4-130-81 (SEQ ID NO:294), DOM4-130-82 (SEQ ID NO:295), DOM4-130-83 (SEQ ID NO:296), DOM4-130-84 (SEQ ID NO:297), DOM4-130-85 (SEQ ID NO:298), DOM4-130-86 (SEQ ID NO:299), DOM4-130-87 (SEQ ID NO:300), DOM4-130-88 (SEQ ID NO:301), DOM4-130-89 (SEQ ID NO:302), DOM4-130-90 (SEQ ID NO:303), DOM4-130-91 (SEQ ID NO:304), DOM4-130-92 (SEQ ID NO:305), DOM4-130-93 (SEQ ID NO:306), DOM4-130-94 (SEQ ID NO:307), DOM4-130-95 (SEQ ID NO:308), DOM4-130-96 (SEQ ID NO:309), DOM4-130-97 (SEQ ID NO:310), DOM4-130-98 (SEQ ID NO:311), DOM4-130-99 (SEQ ID NO:312), DOM4-130-100 (SEQ ID NO:313), DOM4-130-101 (SEQ ID NO:314), DOM4-130-102 (SEQ ID NO:315), DOM4-130-103 (SEQ ID NO:316), DOM4-130-104 (SEQ ID NO:317), DOM4-130-105 (SEQ ID NO:318), DOM4-130-106 (SEQ ID NO:319), DOM4-130-107 (SEQ ID NO:320), DOM4-130-108 (SEQ ID NO:321), DOM4-130-109 (SEQ ID NO:322), DOM4-130-110 (SEQ ID NO:323), DOM4-130-111 (SEQ ID NO:324), DOM4-130-112 (SEQ ID NO:325), DOM4-130-113 (SEQ ID NO:326), DOM4-130-114 (SEQ ID NO:327), DOM4-130-115 (SEQ ID NO:328), DOM4-130-116 (SEQ ID NO:329), DOM4-130-117 (SEQ ID NO:330), DOM4-130-118 (SEQ ID NO:331), DOM4-130-119 (SEQ ID NO:332), DOM4-130-120 (SEQ ID NO:333), DOM4-130-121 (SEQ ID NO:334), DOM4-130-122 (SEQ ID NO:335), DOM4-130-123 (SEQ ID NO:336), DOM4-130-124 (SEQ ID NO:337), DOM4-130-125 (SEQ ID NO:338), DOM4-130-126 (SEQ ID NO:339), DOM4-130-127 (SEQ ID NO:340), DOM4-130-128 (SEQ ID NO:341), DOM4-130-129 (SEQ ID NO:342), DOM4-130-130 (SEQ ID NO:343), DOM4-130-131 (SEQ ID NO:344), DOM4-130-132 (SEQ ID NO:345), DOM4-130-133 (SEQ ID NO:346), DOM4-131 (SEQ ID NO:347), DOM4-132 (SEQ ID NO:348), and DOM4-133 (SEQ ID NO:349).

14. The use of any one of claims 1-14, wherein said polypeptide domain that has binding specificity for IL-1R1 binds human IL-1R1 with an affinity (KD) of about 300 nM to about 5 pM, as determined by surface plasmon resonance.

15. The use of any one of claims 1-14, wherein said antagonist of IL-1R1 further comprises a half-life extending moiety.

16. The use of claim 15, wherein said half-life extending moiety is a polyalkylene glycol moiety, serum albumin or a fragment thereof, transferrin receptor or a transferrin-binding portion thereof, or an antibody or antibody fragment comprising a binding site for a polypeptide that enhances half-life in vivo.

17. The use of claim 16, wherein said half-life extending moiety is a polyethylene glycol moiety.

18. The use of claim 16, wherein said half-life extending moiety is an antibody or antibody fragment comprising a binding site for serum albumin or neonatal Fe receptor.

19. The use of claim 18, wherein said antibody or antibody fragment is an antibody fragment, and said antibody fragment is an immunoglobulin single variable domain.

20. The use of claim 19, wherein said immunoglobulin single variable domain competes with an immunoglobulin single variable domain selected from the group consisting of DOM7m-16 (SEQ ID NO:723), DOM7m-12 (SEQ ID NO:724), DOM7m-26 (SEQ ID NO:725), DOM7r-1 (SEQ ID NO:726), DOM7r-3 (SEQ ID NO:727), DOM7r-4 (SEQ ID NO:728), DOM7r-5 (SEQ ID NO:729), DOM7r-7 (SEQ ID NO:730), DOM7r-8 (SEQ ID NO:731), DOM7h-2 (SEQ ID NO:732), DOM7h-3 (SEQ ID NO:733), DOM7h-4 (SEQ ID NO:734), DOM7h-6 (SEQ ID NO:735), DOM7h-1 (SEQ ID NO:736), DOM7h-7 (SEQ ID NO:737), DOM7h-22 (SEQ ID NO:739), DOM7h-23 (SEQ ID NO:740), DOM7h-24 (SEQ ID NO:741), DOM7h-25 (SEQ ID NO:742), DOM7h-26 (SEQ ID NO:743), DOM7h-21 (SEQ ID NO:744), DOM7h-27 (SEQ ID NO:745), DOM7h-8 (SEQ ID NO:746), DOM7r-13 (SEQ ID NO:747), DOM7r-14 (SEQ ID NO:748), DOM7r-15 (SEQ ID NO:749), DOM7r-16 (SEQ ID NO:750), DOM7r-17 (SEQ ID NO:751), DOM7r-18 (SEQ ID NO:752), DOM7r-19 (SEQ ID NO:753), DOM7r-20 (SEQ ID NO:754), DOM7r-21 (SEQ ID NO:755), DOM7r-22 (SEQ ID NO:756), DOM7r-23 (SEQ ID NO:757), DOM7r-24 (SEQ ID NO:758), DOM7r-25 (SEQ ID NO:759), DOM7r-26 (SEQ ID NO:760), DOM7r-27 (SEQ ID NO:761), DOM7r-28 (SEQ ID NO:762), DOM7r-29 (SEQ ID NO:763), DOM7r-30 (SEQ ID NO:764), DOM7r-31 (SEQ ID NO:765), DOM7r-32 (SEQ ID NO:766), DOM7r-33 (SEQ ID NO:767), Sequence A (SEQ ID NO:768), Sequence B (SEQ ID NO:769), Sequence C (SEQ ID NO:770), Sequence D (SEQ ID NO:771), Sequence E (SEQ ID NO:772), Sequence F (SEQ ID NO:773), Sequence G (SEQ ID NO:774), Sequence H (SEQ ID NO:775), Sequence I (SEQ ID NO:776), Sequence J (SEQ ID NO:777), Sequence K (SEQ ID NO:778), Sequence L (SEQ ID NO:779), Sequence M (SEQ ID NO:780), Sequence N (SEQ ID NO:781), Sequence O (SEQ ID NO:782), Sequence P (SEQ ID NO:783), and Sequence Q (SEQ ID NO:784), for binding to human serum albumin.

21. The use of claim 20, wherein said immunoglobulin single variable domain binds human serum albumin comprises an amino acid sequence selected from the group consisting of DOM7m-16 (SEQ ID NO:723), DOM7m-12 (SEQ ID NO:724), DOM7m-26 (SEQ ID NO:725), DOM7r-1 (SEQ ID NO:726), DOM7r-3 (SEQ ID NO:727), DOM7r-4 (SEQ ID NO:728), DOM7r-5 (SEQ ID NO:729), DOM7r-7 (SEQ ID NO:730), DOM7r-8 (SEQ ID NO:731), DOM7h-2 (SEQ ID NO:732), DOM7h-3 (SEQ ID NO:733), DOM7h-4 (SEQ ID NO:734), DOM7h-6 (SEQ ID NO:735), DOM7h-1 (SEQ ID NO:736), DOM7h-7 (SEQ ID NO:737), DOM7h-22 (SEQ ID NO:739), DOM7h-23 (SEQ ID NO:740), DOM7h-24 (SEQ ID NO:741), DOM7h-25 (SEQ ID NO:742), DOM7h-26 (SEQ ID NO:743), DOM7h-21 (SEQ ID NO:744), DOM7h-27 (SEQ ID NO:745), DOM7h-8 (SEQ ID NO:746), DOM7r-13 (SEQ ID NO:747), DOM7r-14 (SEQ ID NO:748), DOM7r-15 (SEQ ID NO:749), DOM7r-16 (SEQ ID NO:750), DOM7r-17 (SEQ ID NO:751), DOM7r-18 (SEQ ID NO:752), DOM7r-19 (SEQ ID NO:753), DOM7r-20 (SEQ ID NO:754), DOM7r-21 (SEQ ID NO:755), DOM7r-22 (SEQ ID NO:756), DOM7r-23 (SEQ ID NO:757), DOM7r-24 (SEQ ID NO:758), DOM7r-25 (SEQ ID NO:759), DOM7r-26 (SEQ ID NO:760), DOM7r-27 (SEQ ID NO:761), DOM7r-28 (SEQ ID NO:762), DOM7r-29 (SEQ ID NO:763), DOM7r-30 (SEQ ID NO:764), DOM7r-31 (SEQ ID NO:765), DOM7r-32 (SEQ ID NO:766), DOM7r-33 (SEQ ID NO:767), Sequence A (SEQ ID NO:768), Sequence B (SEQ ID NO:769), Sequence C (SEQ ID NO:770), Sequence D (SEQ ID NO:771), Sequence E (SEQ ID NO:772), Sequence F (SEQ ID NO:773), Sequence G (SEQ ID NO:774), Sequence H (SEQ ID NO:775), Sequence I (SEQ ID NO:776), Sequence J (SEQ ID NO:777), Sequence K (SEQ ID NO:778), Sequence L (SEQ ID NO:779), Sequence M (SEQ ID NO:780), Sequence N (SEQ ID NO:781), Sequence O (SEQ ID NO:782), Sequence P (SEQ ID NO:783), and Sequence Q (SEQ ID NO:784).

22. The use of any one of claims 1-21, wherein said antagonist of IL-1R1 further comprises a polypeptide binding domain that has binding specificity for Tumor Necrosis Factor Receptor 1 (TNFR1, p55) and inhibits binding of Tumor Necrosis Factor Alpha (TNFα) to TNFR1.

23. The use of any one of claims 1-22, wherein said antagonist of IL-1R1 binds human IL-1R1 with an affinity (KD) of about 300 nM to about 5 pM, as determined by surface plasmon resonance.

24. The use of any one of claims 1-23, wherein said respiratory disease is selected from the group consisting of lung inflammation, chronic obstructive pulmonary disease, asthma, pneumonia, hypersensitivity pneumonitis, pulmonary infiltrate with eosinophilia, environmental lung disease, pneumonia, bronchiectasis, cystic fibrosis, interstitial lung disease, primary pulmonary hypertension, pulmonary thromboembolism, disorders of the pleura, disorders of the mediastinum, disorders of the diaphragm, hypoventilation, hyperventilation, sleep apnea, acute respiratory distress syndrome, mesothelioma, sarcoma, graft rejection, graft versus host disease, lung cancer, allergic rhinitis, allergy, asbestosis, aspergilloma, aspergillosis, bronchiectasis, chronic bronchitis, emphysema, eosinophilic pneumonia, idiopathic pulmonary fibrosis, invasive pneumococcal disease, influenza, nontuberculous mycobacteria, pleural effusion, pneumoconiosis, pneumocytosis, pneumonia, pulmonary actinomycosis, pulmonary alveolar proteinosis, pulmonary anthrax, pulmonary edema, pulmonary embolus, pulmonary inflammation, pulmonary histiocytosis X, pulmonary hypertension, pulmonary nocardiosis, pulmonary tuberculosis, pulmonary veno-occlusive disease, rheumatoid lung disease, sarcoidosis, and Wegener's granulomatosis.

25. The use of any one of claims 1-24, wherein the medicament is for administration together with an antagonist of Tumor Necrosis Factor Receptor 1 (TNFR1, p55), or further comprises an antagonist of TNFR1.

26. The use of any one of claims 1-24, wherein said medicament is for treating a respiratory disease by systemic administration of the medicament.

27. The use of claim 26, wherein said medicament is for treating a respiratory disease by systemic administration of the medicament, wherein systemic administration is intraperoneal or subcutaneous administration.

28. The use of any one of claims 1-24, wherein said medicament is for treating a respiratory disease by local administration of said medicament to pulmonary tissue.

29. The use of claim 28, wherein s said medicament is for treating a respiratory disease by local administration of said medicament to pulmonary tissue by inhalation or intranasal administration.

30. The use of any one of claims 1-29, wherein the level of inflammatory cells in the lung is assessed by total cell counts in bronchoalveolar lavage, sputum or bronchial biopsy is reduced relative to pretreatment levels.

31. The use of claim 30, wherein the level of inflammatory cells in the lung is assessed by macrophage, polymorphonuclear, lymphocyte and/or eosinophil cell counts in bronchoalveolar lavage, sputum or bronchial biopsy.

32. Use of an antagonist of Interleukin-1 Receptor Type 1 (IL-1R1) for the manufacture of a medicament for treating a respiratory disease, wherein said antagonist of IL-1R1 is a fusion protein or a conjugate comprising an antagonist of IL-1R1 moiety and a half-life extending moiety, wherein said antagonist of IL-1R1 moiety binds human IL-1R1 and inhibits binding of Interleukin-1 to human IL-1R1, and said half-life extending moiety is a polypeptide binding moiety that contains a binding site with binding specificity for a polypeptide that enhances serum half-life in vivo.

33. The use of claim 32, wherein said antagonist of IL-1R1 moiety is human Interleukin 1 receptor antagonist (IL-1ra) or a functional variant of human IL-1ra.

34. The use of claim 33, wherein said antagonist of IL-1R1 moiety is an immunoglobulin single variable domain that competes for binding to IL-1R1 with an immunoglobulin single variable domain selected from the group consisting of DOM4-122-23 (SEQ ID NO:1), DOM4-122-24 (SEQ ID NO:2), DOM4-130-30 (SEQ ID NO:3), DOM4-130-46 (SEQ ID NO:4), DOM4-130-51 (SEQ ID NO:5), DOM4-130-53 (SEQ ID NO:6), DOM4-130-54 (SEQ ID NO:7), DOM4-1 (SEQ ID NO:8), DOM4-2 (SEQ ID NO:9), DOM4-3 (SEQ ID NO:10), DOM4-4 (SEQ ID NO: 11), DOM4-5 (SEQ ID NO: 12), DOM4-6 (SEQ ID NO: 13), DOM4-7 (SEQ ID NO:14), DOM4-8 (SEQ ID NO:15), DOM4-9 (SEQ ID NO:16), DOM4-10 (SEQ ID NO: 17), DOM4-11 (SEQ ID NO: 18), DOM4-12 (SEQ ID NO: 19), DOM4-13 (SEQ ID NO:20), DOM4-14 (SEQ ID NO:21), DOM4-15 (SEQ ID NO:22), DOM4-20 (SEQ ID NO:23), DOM4-21 (SEQ ID NO:24), DOM4-22 (SEQ ID NO:25), DOM4-23 (SEQ ID NO:26), DOM4-25 (SEQ ID NO:27), DOM4-26 (SEQ ID NO:28), DOM4-27 (SEQ ID NO:29), DOM4-28 (SEQ ID NO:30), DOM4-29 (SEQ ID NO:31), DOM4-31 (SEQ ID NO:32), DOM4-32 (SEQ ID NO:33), DOM4-33 (SEQ ID NO:34), DOM4-34 (SEQ ID NO:35), DOM4-36 (SEQ ID NO:36), DOM4-37 (SEQ ID NO:37), DOM4-38 (SEQ ID NO:38), DOM4-39 (SEQ ID NO:39), DOM4-40 (SEQ ID NO:40), DOM4-41 (SEQ ID NO:41), DOM4-42 (SEQ ID NO:42), DOM4-44 (SEQ ID NO:43), DOM4-45 (SEQ ID NO:44), DOM4-46 (SEQ ID NO:45), DOM4-49 (SEQ ID NO:46), DOM4-50 (SEQ ID NO:47), DOM4-74 (SEQ ID NO:48), DOM4-75 (SEQ ID NO:49), DOM4-76 (SEQ ID NO:50), DOM4-78 (SEQ ID NO:51), DOM4-79 (SEQ ID NO:52), DOM4-80 (SEQ ID NO:53), DOM4-81 (SEQ ID NO:54), DOM4-82 (SEQ ID NO:55), DOM4-83 (SEQ ID NO:56), DOM4-84 (SEQ ID NO:57), DOM4-85 (SEQ ID NO:58), DOM4-86 (SEQ ID NO:59), DOM4-87 (SEQ ID NO:60), DOM4-88 (SEQ ID NO:61), DOM4-89 (SEQ ID NO:62), DOM4-90 (SEQ ID NO:63), DOM4-91 (SEQ ID NO:64), DOM4-92 (SEQ ID NO:65), DOM4-93 (SEQ ID NO:66), DOM4-94 (SEQ ID NO:67), DOM4-95 (SEQ ID NO:68), DOM4-96 (SEQ ID NO:69), DOM4-97 (SEQ ID NO:70), DOM4-98 (SEQ ID NO:71), DOM4-99 (SEQ ID NO:72), DOM4-100 (SEQ ID NO:73), DOM4-101 (SEQ ID NO:74), DOM4-102 (SEQ ID NO:75), DOM4-103 (SEQ ID NO:76), DOM4-104 (SEQ ID NO:77), DOM4-105 (SEQ ID NO:78), DOM4-106 (SEQ ID NO:79), DOM4-107 (SEQ ID NO:80), DOM4-108 (SEQ ID NO:81), DOM4-109 (SEQ ID NO:82), DOM4-110 (SEQ ID NO:83), DOM4-111 (SEQ ID NO:84), DOM4-112 (SEQ ID NO:85), DOM4-113 (SEQ ID NO:86), DOM4-114 (SEQ ID NO:87), DOM4-115 (SEQ ID NO:88), DOM4-116 (SEQ ID NO:89), DOM4-117 (SEQ ID NO:90), DOM4-118 (SEQ ID NO:91), DOM4-119 (SEQ ID NO:92), DOM4-120 (SEQ ID NO:93), DOM4-121 (SEQ ID NO:94), DOM4-122 (SEQ ID NO:95), DOM4-122-1 (SEQ ID NO:96), DOM4-122-2 (SEQ ID NO:97), DOM4-122-3 (SEQ ID NO:98), DOM4-122-4 (SEQ ID NO:99), DOM4-122-5 (SEQ ID NO:100), DOM4-122-6 (SEQ ID NO:101), DOM4-122-7 (SEQ ID NO:102), DOM4-122-8 (SEQ ID NO:103), DOM4-122-9 (SEQ ID NO:104), DOM4-122-10 (SEQ ID NO:105), DOM4-122-11 (SEQ ID NO:106), DOM4-122-12 (SEQ ID NO:107), DOM4-122-13 (SEQ ID NO:108), DOM4-122-14 (SEQ ID NO:109), DOM4-122-15 (SEQ ID NO:110), DOM4-122-16 (SEQ ID NO:111), DOM4-122-17 (SEQ ID NO:112), DOM4-122-18 (SEQ ID NO:113), DOM4-122-19 (SEQ ID NO:114), DOM4-122-20 (SEQ ID NO:115), DOM4-122-21 (SEQ ID NO:116), DOM4-122-22 (SEQ ID NO:117), DOM4-122-25 (SEQ ID NO:118), DOM4-122-26 (SEQ ID NO:119), DOM4-122-27 (SEQ ID NO:120), DOM4-122-28 (SEQ ID NO:121), DOM4-122-29 (SEQ ID NO:122), DOM4-122-30 (SEQ ID NO:123), DOM4-122-31 (SEQ ID NO:124), DOM4-122-32 (SEQ ID NO:125), DOM4-122-33 (SEQ ID NO:126), DOM4-122-34 (SEQ ID NO:127), DOM4-122-35 (SEQ ID NO:128), DOM4-122-36 (SEQ ID NO:129), DOM4-122-37 (SEQ ID NO:130), DOM4-122-38 (SEQ ID NO:131), DOM4-122-39 (SEQ ID NO:132), DOM4-122-40 (SEQ ID NO:133), DOM4-122-41 (SEQ ID NO:134), DOM4-122-42 (SEQ ID NO:135), DOM4-122-43 (SEQ ID NO:136), DOM4-122-44 (SEQ ID NO:137), DOM4-122-45 (SEQ ID NO:138), DOM4-122-46 (SEQ ID NO:139), DOM4-122-47 (SEQ ID NO:140), DOM4-122-48 (SEQ ID NO:141), DOM4-122-49 (SEQ ID NO:142), DOM4-122-50 (SEQ ID NO:143), DOM4-122-51 (SEQ ID NO:144), DOM4-122-52 (SEQ ID NO:145), DOM4-122-54 (SEQ ID NO:146), DOM4-122-55 (SEQ ID NO:147), DOM4-122-56 (SEQ ID NO:148), DOM4-122-57 (SEQ ID NO:149), DOM4-122-58 (SEQ ID NO:150), DOM4-122-59 (SEQ ID NO:151), DOM4-122-60 (SEQ ID NO:152), DOM4-122-61 (SEQ ID NO:153), DOM4-122-62 (SEQ ID NO:154), DOM4-122-63 (SEQ ID NO:155), DOM4-122-64 (SEQ ID NO:156), DOM4-122-65 (SEQ ID NO:157), DOM4-122-66 (SEQ ID NO:158), DOM4-122-67 (SEQ ID NO:159), DOM4-122-68 (SEQ ID NO:160), DOM4-122-69 (SEQ ID NO:161), DOM4-122-70 (SEQ ID NO:162), DOM4-122-71 (SEQ ID NO:163), DOM4-122-72 (SEQ ID NO:164), DOM4-122-73 (SEQ ID NO:165), DOM4-123 (SEQ ID NO:166), DOM4-124 (SEQ ID NO:167) DOM4-125 (SEQ ID NO:168), DOM4-126 (SEQ ID NO:169), DOM4-127 (SEQ ID NO:170), DOM4-128 (SEQ ID NO:171), DOM4-129 (SEQ ID NO:172), DOM4-129-1 (SEQ ID NO:173), DOM4-129-2 (SEQ ID NO:174), DOM4-129-3 (SEQ ID NO:175), DOM4-129-4 (SEQ ID NO:176), DOM4-129-5 (SEQ ID NO:177), DOM4-129-6 (SEQ ID NO:178), DOM4-129-7 (SEQ ID NO:179), DOM4-129-8 (SEQ ID NO:180), DOM4-129-9 (SEQ ID NO:181), DOM4-129-10 (SEQ ID NO:182), DOM4-129-11 (SEQ ID NO:183), DOM4-129-12 (SEQ ID NO:184), DOM4-129-13 (SEQ ID NO:185), DOM4-129-14 (SEQ ID NO:186), DOM4-129-15 (SEQ ID NO:187), DOM4-129-16 (SEQ ID NO:188), DOM4-129-17 (SEQ ID NO:189), DOM4-129-18 (SEQ ID NO:190), DOM4-129-19 (SEQ ID NO:191), DOM4-129-20 (SEQ ID NO:192), DOM4-129-21 (SEQ ID NO:193), DOM4-129-22 (SEQ ID NO:194), DOM4-129-23 (SEQ ID NO:195), DOM4-129-24 (SEQ ID NO:196), DOM4-129-25 (SEQ ID NO:197), DOM4-129-26 (SEQ ID NO:198), DOM4-129-27 (SEQ ID NO:199), DOM4-129-28 (SEQ ID NO:200), DOM4-129-29 (SEQ ID NO:201), DOM4-129-31 (SEQ ID NO:202), DOM4-129-32 (SEQ ID NO:203), DOM4-129-33 (SEQ ID NO:204), DOM4-129-34 (SEQ ID NO:205), DOM4-129-35 (SEQ ID NO:206), DOM4-129-37 (SEQ ID NO:207), DOM4-129-38 (SEQ ID NO:208), DOM4-129-39 (SEQ ID NO:209), DOM4-129-40 (SEQ ID NO:210), DOM4-129-41 (SEQ ID NO:211), DOM4-129-42 (SEQ ID NO:212), DOM4-129-43 (SEQ ID NO:213), DOM4-129-44 (SEQ ID NO:214), DOM4-130 (SEQ ID NO:215), DOM4-130-1 (SEQ ID NO:216), DOM4-130-2 (SEQ ID NO:217), DOM4-130-3 (SEQ ID NO:218), DOM4-130-4 (SEQ ID NO:219), DOM4-130-5 (SEQ ID NO:220), DOM4-130-6 (SEQ ID NO:221), DOM4-130-7 (SEQ ID NO:222), DOM4-130-8 (SEQ ID NO:223), DOM4-130-9 (SEQ ID NO:224), DOM4-130-10 (SEQ ID NO:225), DOM4-130-11 (SEQ ID NO:226), DOM4-130-12 (SEQ ID NO:227), DOM4-130-13 (SEQ ID NO:228), DOM4-130-14 (SEQ ID NO:229), DOM4-130-15 (SEQ ID NO:230), DOM4-130-16 (SEQ ID NO:231), DOM4-130-17 (SEQ ID NO:232), DOM4-130-18 (SEQ ID NO:233), DOM4-130-19 (SEQ ID NO:234), DOM4-130-20 (SEQ ID NO:235), DOM4-130-21 (SEQ ID NO:236), DOM4-130-22 (SEQ ID NO:237), DOM4-130-23 (SEQ ID NO:238), DOM4-130-24 (SEQ ID NO:239), DOM4-130-25 (SEQ ID NO:240), DOM4-130-26 (SEQ ID NO:241), DOM4-130-27 (SEQ ID NO:242), DOM4-130-28 (SEQ ID NO:243), DOM4-130-31 (SEQ ID NO:244), DOM4-130-32 (SEQ ID NO:245), DOM4-130-33 (SEQ ID NO:246), DOM4-130-34 (SEQ ID NO:247), DOM4-130-35 (SEQ ID NO:248), DOM4-130-36 (SEQ ID NO:249), DOM4-130-37 (SEQ ID NO:250), DOM4-130-38 (SEQ ID NO:251), DOM4-130-39 (SEQ ID NO:252), DOM4-130-40 (SEQ ID NO:253), DOM4-130-41 (SEQ ID NO:254), DOM4-130-42 (SEQ ID NO:255), DOM4-130-43 (SEQ ID NO:256), DOM4-130-44 (SEQ ID NO:257), DOM4-130-45 (SEQ ID NO:258), DOM4-130-46 (SEQ ID NO:259), DOM4-130-47 (SEQ ID NO:260), DOM4-130-48 (SEQ ID NO:261), DOM4-130-49 (SEQ ID NO:262), DOM4-130-50 (SEQ ID NO:263), DOM4-130-51 (SEQ ID NO:264), DOM4-130-52 (SEQ ID NO:265), DOM4-130-53 (SEQ ID NO:266), DOM4-130-54 (SEQ ID NO:267), DOM4-130-55 (SEQ ID NO:268), DOM4-130-56 (SEQ ID NO:269), DOM4-130-57 (SEQ ID NO:270), DOM4-130-58 (SEQ ID NO:271), DOM4-130-59 (SEQ ID NO:272), DOM4-130-60 (SEQ ID NO:273), DOM4-130-61 (SEQ ID NO:274), DOM4-130-62 (SEQ ID NO:275), DOM4-130-63 (SEQ ID NO:276), DOM4-130-64 (SEQ ID NO:277), DOM4-130-65 (SEQ ID NO:278), DOM4-130-66 (SEQ ID NO:279), DOM4-130-67 (SEQ ID NO:280), DOM4-130-68 (SEQ ID NO:281), DOM4-130-69 (SEQ ID NO:282), DOM4-130-70 (SEQ ID NO:283), DOM4-130-71 (SEQ ID NO:284), DOM4-130-72 (SEQ ID NO:285), DOM4-130-73 (SEQ ID NO:286), DOM4-130-74 (SEQ ID NO:287), DOM4-130-75 (SEQ ID NO:288), DOM4-130-76 (SEQ ID NO:289), DOM4-130-77 (SEQ ID NO:290), DOM4-130-78 (SEQ ID NO:291), DOM4-130-79 (SEQ ID NO:292), DOM4-130-80 (SEQ ID NO:293), DOM4-130-81 (SEQ ID NO:294), DOM4-130-82 (SEQ ID NO:295), DOM4-130-83 (SEQ ID NO:296), DOM4-130-84 (SEQ ID NO:297), DOM4-130-85 (SEQ ID NO:298), DOM4-130-86 (SEQ ID NO:299), DOM4-130-87 (SEQ ID NO:300), DOM4-130-88 (SEQ ID NO:301), DOM4-130-89 (SEQ ID NO:302), DOM4-130-90 (SEQ ID NO:303), DOM4-130-91 (SEQ ID NO:304), DOM4-130-92 (SEQ ID NO:305), DOM4-130-93 (SEQ ID NO:306), DOM4-130-94 (SEQ ID NO:307), DOM4-130-95 (SEQ ID NO:308), DOM4-130-96 (SEQ ID NO:309), DOM4-130-97 (SEQ ID NO:310), DOM4-130-98 (SEQ ID NO:311), DOM4-130-99 (SEQ ID NO:312), DOM4-130-100 (SEQ ID NO:313), DOM4-130-101 (SEQ ID NO:314), DOM4-130-102 (SEQ ID NO:315), DOM4-130-103 (SEQ ID NO:316), DOM4-130-104 (SEQ ID NO:317), DOM4-130-105 (SEQ ID NO:318), DOM4-130-106 (SEQ ID NO:319), DOM4-130-107 (SEQ ID NO:320), DOM4-130-108 (SEQ ID NO:321), DOM4-130-109 (SEQ ID NO:322), DOM4-130-110 (SEQ ID NO:323), DOM4-130-111 (SEQ ID NO:324), DOM4-130-112 (SEQ ID NO:325), DOM4-130-113 (SEQ ID NO:326), DOM4-130-114 (SEQ ID NO:327), DOM4-130-115 (SEQ ID NO:328), DOM4-130-116 (SEQ ID NO:329), DOM4-130-117 (SEQ ID NO:330), DOM4-130-118 (SEQ ID NO:331), DOM4-130-119 (SEQ ID NO:332), DOM4-130-120 (SEQ ID NO:333), DOM4-130-121 (SEQ ID NO:334), DOM4-130-122 (SEQ ID NO:335), DOM4-130-123 (SEQ ID NO:336), DOM4-130-124 (SEQ ID NO:337), DOM4-130-125 (SEQ ID NO:338), DOM4-130-126 (SEQ ID NO:339), DOM4-130-127 (SEQ ID NO:340), DOM4-130-128 (SEQ ID NO:341), DOM4-130-129 (SEQ ID NO:342), DOM4-130-130 (SEQ ID NO:343), DOM4-130-131 (SEQ ID NO:344), DOM4-130-132 (SEQ ID NO:345), DOM4-130-133 (SEQ ID NO:346), DOM4-131 (SEQ ID NO:347), DOM4-132 (SEQ ID NO:348), and DOM4-133 (SEQ ID NO:349).

35. The use of claim 33, wherein said antagonist of IL-1R1 moiety is an immunoglobulin single variable domain that comprises an amino acid sequence that has at least about 90% amino acid sequence identity with an amino acid sequence selected from the group consisting of DOM4-122-23 (SEQ ID NO:1), DOM4-122-24 (SEQ ID NO:2), DOM4-130-30 (SEQ ID NO:3), DOM4-130-46 (SEQ ID NO:4), DOM4-130-51 (SEQ ID NO:5), DOM4-130-53 (SEQ ID NO:6), DOM4-130-54 (SEQ ID NO:7), DOM4-1 (SEQ ID NO:8), DOM4-2 (SEQ ID NO:9), DOM4-3 (SEQ ID NO:10), DOM4-4 (SEQ ID NO:11), DOM4-5 (SEQ ID NO:12), DOM4-6 (SEQ ID NO:13), DOM4-7 (SEQ ID NO:14), DOM4-8 (SEQ ID NO:15), DOM4-9 (SEQ ID NO:16), DOM4-10 (SEQ ID NO:17), DOM4-11 (SEQ ID NO:18), DOM4-12 (SEQ ID NO:19), DOM4-13 (SEQ ID NO:20), DOM4-14 (SEQ ID NO:21), DOM4-15 (SEQ ID NO:22), DOM4-20 (SEQ ID NO:23), DOM4-21 (SEQ ID NO:24), DOM4-22 (SEQ ID NO:25), DOM4-23 (SEQ ID NO:26), DOM4-25 (SEQ ID NO:27), DOM4-26 (SEQ ID NO:28), DOM4-27 (SEQ ID NO:29), DOM4-28 (SEQ ID NO:30), DOM4-29 (SEQ ID NO:31), DOM4-31 (SEQ ID NO:32), DOM4-32 (SEQ ID NO:33), DOM4-33 (SEQ ID NO:34), DOM4-34 (SEQ ID NO:35), DOM4-36 (SEQ ID NO:36), DOM4-37 (SEQ ID NO:37), DOM4-38 (SEQ ID NO:38), DOM4-39 (SEQ ID NO:39), DOM4-40 (SEQ ID NO:40), DOM4-41 (SEQ ID NO:41), DOM4-42 (SEQ ID NO:42), DOM4-44 (SEQ ID NO:43), DOM4-45 (SEQ ID NO:44), DOM4-46 (SEQ ID NO:45), DOM4-49 (SEQ ID NO:46), DOM4-50 (SEQ ID NO:47), DOM4-74 (SEQ ID NO:48), DOM4-75 (SEQ ID NO:49), DOM4-76 (SEQ ID NO:50), DOM4-78 (SEQ ID NO:51), DOM4-79 (SEQ ID NO:52), DOM4-80 (SEQ ID NO:53), DOM4-81 (SEQ ID NO:54), DOM4-82 (SEQ ID NO:55), DOM4-83 (SEQ ID NO:56), DOM4-84 (SEQ ID NO:57), DOM4-85 (SEQ ID NO:58), DOM4-86 (SEQ ID NO:59), DOM4-87 (SEQ ID NO:60), DOM4-88 (SEQ ID NO:61), DOM4-89 (SEQ ID NO:62), DOM4-90 (SEQ ID NO:63), DOM4-91 (SEQ ID NO:64), DOM4-92 (SEQ ID NO:65), DOM4-93 (SEQ ID NO:66), DOM4-94 (SEQ ID NO:67), DOM4-95 (SEQ ID NO:68), DOM4-96 (SEQ ID NO:69), DOM4-97 (SEQ ID NO:70), DOM4-98 (SEQ ID NO:71), DOM4-99 (SEQ ID NO:72), DOM4-100 (SEQ ID NO:73), DOM4-101 (SEQ ID NO:74), DOM4-102 (SEQ ID NO:75), DOM4-103 (SEQ ID NO:76), DOM4-104 (SEQ ID NO:77), DOM4-105 (SEQ ID NO:78), DOM4-106 (SEQ ID NO:79), DOM4-107 (SEQ ID NO:80), DOM4-108 (SEQ ID NO:81), DOM4-109 (SEQ ID NO:82), DOM4-110 (SEQ ID NO:83), DOM4-111 (SEQ ID NO:84), DOM4-112 (SEQ ID NO:85), DOM4-113 (SEQ ID NO:86), DOM4-114 (SEQ ID NO:87), DOM4-115 (SEQ ID NO:88), DOM4-116 (SEQ ID NO:89), DOM4-117 (SEQ ID NO:90), DOM4-118 (SEQ ID NO:91), DOM4-119 (SEQ ID NO:92), DOM4-120 (SEQ ID NO:93), DOM4-121 (SEQ ID NO:94), DOM4-122 (SEQ ID NO:95), DOM4-122-1 (SEQ ID NO:96), DOM4-122-2 (SEQ ID NO:97), DOM4-122-3 (SEQ ID NO:98), DOM4-122-4 (SEQ ID NO:99), DOM4-122-5 (SEQ ID NO:100), DOM4-122-6 (SEQ ID NO:101), DOM4-122-7 (SEQ ID NO:102), DOM4-122-8 (SEQ ID NO:103), DOM4-122-9 (SEQ ID NO:104), DOM4-122-10 (SEQ ID NO:105), DOM4-122-11 (SEQ ID NO:106), DOM4-122-12 (SEQ ID NO:107), DOM4-122-13 (SEQ ID NO:108), DOM4-122-14 (SEQ ID NO:109), DOM4-122-15 (SEQ ID NO:110), DOM4-122-16 (SEQ ID NO:111), DOM4-122-17 (SEQ ID NO:112), DOM4-122-18 (SEQ ID NO:113), DOM4-122-19 (SEQ ID NO:114), DOM4-122-20 (SEQ ID NO:115), DOM4-122-21 (SEQ ID NO:116), DOM4-122-22 (SEQ ID NO:117), DOM4-122-25 (SEQ ID NO:118), DOM4-122-26 (SEQ ID NO:119), DOM4-122-27 (SEQ ID NO:120), DOM4-122-28 (SEQ ID NO:121), DOM4-122-29 (SEQ ID NO:122), DOM4-122-30 (SEQ ID NO:123), DOM4-122-31 (SEQ ID NO:124), DOM4-122-32 (SEQ ID NO:125), DOM4-122-33 (SEQ ID NO:126), DOM4-122-34 (SEQ ID NO:127), DOM4-122-35 (SEQ ID NO:128), DOM4-122-36 (SEQ ID NO:129), DOM4-122-37 (SEQ ID NO:130), DOM4-122-38 (SEQ ID NO:131), DOM4-122-39 (SEQ ID NO:132), DOM4-122-40 (SEQ ID NO:133), DOM4-122-41 (SEQ ID NO:134), DOM4-122-42 (SEQ ID NO:135), DOM4-122-43 (SEQ ID NO:136), DOM4-122-44 (SEQ ID NO:137), DOM4-122-45 (SEQ ID NO:138), DOM4-122-46 (SEQ ID NO:139), DOM4-122-47 (SEQ ID NO:140), DOM4-122-48 (SEQ ID NO:141), DOM4-122-49 (SEQ ID NO:142), DOM4-122-50 (SEQ ID NO:143), DOM4-122-51 (SEQ ID NO:144), DOM4-122-52 (SEQ ID NO:145), DOM4-122-54 (SEQ ID NO:146), DOM4-122-55 (SEQ ID NO:147), DOM4-122-56 (SEQ ID NO:148), DOM4-122-57 (SEQ ID NO:149), DOM4-122-58 (SEQ ID NO:150), DOM4-122-59 (SEQ ID NO:151), DOM4-122-60 (SEQ ID NO:152), DOM4-122-61 (SEQ ID NO:153), DOM4-122-62 (SEQ ID NO:154), DOM4-122-63 (SEQ ID NO:155), DOM4-122-64 (SEQ ID NO:156), DOM4-122-65 (SEQ ID NO:157), DOM4-122-66 (SEQ ID NO:158), DOM4-122-67 (SEQ ID NO:159), DOM4-122-68 (SEQ ID NO:160), DOM4-122-69 (SEQ ID NO:161), DOM4-122-70 (SEQ ID NO:162), DOM4-122-71 (SEQ ID NO:163), DOM4-122-72 (SEQ ID NO:164), DOM4-122-73 (SEQ ID NO:165), DOM4-123 (SEQ ID NO:166), DOM4-124 (SEQ ID NO:167) DOM4-125 (SEQ ID NO:168), DOM4-126 (SEQ ID NO:169), DOM4-127 (SEQ ID NO:170), DOM4-128 (SEQ ID NO:171), DOM4-129 (SEQ ID NO:172), DOM4-129-1 (SEQ ID NO:173), DOM4-129-2 (SEQ ID NO:174), DOM4-129-3 (SEQ ID NO:175), DOM4-129-4 (SEQ ID NO:176), DOM4-129-5 (SEQ ID NO:177), DOM4-129-6 (SEQ ID NO:178), DOM4-129-7 (SEQ ID NO:179), DOM4-129-8 (SEQ ID NO:180), DOM4-129-9 (SEQ ID NO:181), DOM4-129-10 (SEQ ID NO:182), DOM4-129-11 (SEQ ID NO:183), DOM4-129-12 (SEQ ID NO:184), DOM4-129-13 (SEQ ID NO:185), DOM4-129-14 (SEQ ID NO:186), DOM4-129-15 (SEQ ID NO:187), DOM4-129-16 (SEQ ID NO:188), DOM4-129-17 (SEQ ID NO:189), DOM4-129-18 (SEQ ID NO:190), DOM4-129-19 (SEQ ID NO:191), DOM4-1129-20 (SEQ ID NO:192), DOM4-129-21 (SEQ ID NO:193), DOM4-129-22 (SEQ ID NO:194), DOM4-129-23 (SEQ ID NO:195), DOM4-129-24 (SEQ ID NO:196), DOM4-129-25 (SEQ ID NO:197), DOM4-129-26 (SEQ ID NO:198), DOM4-129-27 (SEQ ID NO:199), DOM4-129-28 (SEQ ID NO:200), DOM4-129-29 (SEQ ID NO:201), DOM4-129-31 (SEQ ID NO:202), DOM4-129-32 (SEQ ID NO:203), DOM4-129-33 (SEQ ID NO:204), DOM4-129-34 (SEQ ID NO:205), DOM4-129-35 (SEQ ID NO:206), DOM4-129-37 (SEQ ID NO:207), DOM4-129-38 (SEQ ID NO:208), DOM4-129-39 (SEQ ID NO:209), DOM4-129-40 (SEQ ID NO:210), DOM4-129-41 (SEQ ID NO:211), DOM4-129-42 (SEQ ID NO:212), DOM4-129-43 (SEQ ID NO:213), DOM4-129-44 (SEQ ID NO:214), DOM4-130 (SEQ ID NO:215), DOM4-130-1 (SEQ ID NO:216), DOM4-130-2 (SEQ ID NO:217), DOM4-130-3 (SEQ ID NO:218), DOM4-130-4 (SEQ ID NO:219), DOM4-130-5 (SEQ ID NO:220), DOM4-130-6 (SEQ ID NO:221), DOM4-130-7 (SEQ ID NO:222), DOM4-130-8 (SEQ ID NO:223), DOM4-130-9 (SEQ ID NO:224), DOM4-130-10 (SEQ ID NO:225), DOM4-130-11 (SEQ ID NO:226), DOM4-130-12 (SEQ ID NO:227), DOM4-130-13 (SEQ ID NO:228), DOM4-130-14 (SEQ ID NO:229), DOM4-130-15 (SEQ ID NO:230), DOM4-130-16 (SEQ ID NO:231), DOM4-130-17 (SEQ ID NO:232), DOM4-130-18 (SEQ ID NO:233), DOM4-130-19 (SEQ ID NO:234), DOM4-130-20 (SEQ ID NO:235), DOM4-130-21 (SEQ ID NO:236), DOM4-130-22 (SEQ ID NO:237), DOM4-130-23 (SEQ ID NO:238), DOM4-130-24 (SEQ ID NO:239), DOM4-130-25 (SEQ ID NO:240), DOM4-130-26 (SEQ ID NO:241), DOM4-130-27 (SEQ ID NO:242), DOM4-130-28 (SEQ ID NO:243), DOM4-130-31 (SEQ ID NO:244), DOM4-130-32 (SEQ ID NO:245), DOM4-130-33 (SEQ ID NO:246), DOM4-130-34 (SEQ ID NO:247), DOM4-130-35 (SEQ ID NO:248), DOM4-130-36 (SEQ ID NO:249), DOM4-130-37 (SEQ ID NO:250), DOM4-130-38 (SEQ ID NO:251), DOM4-130-39 (SEQ ID NO:252), DOM4-130-40 (SEQ ID NO:253), DOM4-130-41 (SEQ ID NO:254), DOM4-130-42 (SEQ ID NO:255), DOM4-130-43 (SEQ ID NO:256), DOM4-130-44 (SEQ ID NO:257), DOM4-130-45 (SEQ ID NO:258), DOM4-130-46 (SEQ ID NO:259), DOM4-130-47 (SEQ ID NO:260), DOM4-130-48 (SEQ ID NO:261), DOM4-130-49 (SEQ ID NO:262), DOM4-130-50 (SEQ ID NO:263), DOM4-130-51 (SEQ ID NO:264), DOM4-130-52 (SEQ ID NO:265), DOM4-130-53 (SEQ ID NO:266), DOM4-130-54 (SEQ ID NO:267), DOM4-130-55 (SEQ ID NO:268), DOM4-130-56 (SEQ ID NO:269), DOM4-130-57 (SEQ ID NO:270), DOM4-130-58 (SEQ ID NO:271), DOM4-130-59 (SEQ ID NO:272), DOM4-130-60 (SEQ ID NO:273), DOM4-130-61 (SEQ ID NO:274), DOM4-130-62 (SEQ ID NO:275), DOM4-130-63 (SEQ ID NO:276), DOM4-130-64 (SEQ ID NO:277), DOM4-130-65 (SEQ ID NO:278), DOM4-130-66 (SEQ ID NO:279), DOM4-130-67 (SEQ ID NO:280), DOM4-130-68 (SEQ ID NO:281), DOM4-130-69 (SEQ ID NO:282), DOM4-130-70 (SEQ ID NO:283), DOM4-130-71 (SEQ ID NO:284), DOM4-130-72 (SEQ ID NO:285), DOM4-130-73 (SEQ ID NO:286), DOM4-130-74 (SEQ ID NO:287), DOM4-130-75 (SEQ ID NO:288), DOM4-130-76 (SEQ ID NO:289), DOM4-130-77 (SEQ ID NO:290), DOM4-130-78 (SEQ ID NO:291), DOM4-130-79 (SEQ ID NO:292), DOM4-130-80 (SEQ ID NO:293), DOM4-130-81 (SEQ ID NO:294), DOM4-130-82 (SEQ ID NO:295), DOM4-130-83 (SEQ ID NO:296), DOM4-130-84 (SEQ ID NO:297), DOM4-130-85 (SEQ ID NO:298), DOM4-130-86 (SEQ ID NO:299), DOM4-130-87 (SEQ ID NO:300), DOM4-130-88 (SEQ ID NO:301), DOM4-130-89 (SEQ ID NO:302), DOM4-130-90 (SEQ ID NO:303), DOM4-130-91 (SEQ ID NO:304), DOM4-130-92 (SEQ ID NO:305), DOM4-130-93 (SEQ ID NO:306), DOM4-130-94 (SEQ ID NO:307), DOM4-130-95 (SEQ ID NO:308), DOM4-130-96 (SEQ ID NO:309), DOM4-130-97 (SEQ ID NO:310), DOM4-130-98 (SEQ ID NO:311), DOM4-130-99 (SEQ ID NO:312), DOM4-130-100 (SEQ ID NO:313), DOM4-130-101 (SEQ ID NO:314), DOM4-130-102 (SEQ ID NO:315), DOM4-130-103 (SEQ ID NO:316), DOM4-130-104 (SEQ ID NO:317), DOM4-130-105 (SEQ ID NO:318), DOM4-130-106 (SEQ ID NO:319), DOM4-130-107 (SEQ ID NO:320), DOM4-130-108 (SEQ ID NO:321), DOM4-130-109 (SEQ ID NO:322), DOM4-130-110 (SEQ ID NO:323), DOM4-130-111 (SEQ ID NO:324), DOM4-130-112 (SEQ ID NO:325), DOM4-130-113 (SEQ ID NO:326), DOM4-130-114 (SEQ ID NO:327), DOM4-130-115 (SEQ ID NO:328), DOM4-130-116 (SEQ ID NO:329), DOM4-130-117 (SEQ ID NO:330), DOM4-130-118 (SEQ ID NO:331), DOM4-130-119 (SEQ ID NO:332), DOM4-130-120 (SEQ ID NO:333), DOM4-130-121 (SEQ ID NO:334), DOM4-130-122 (SEQ ID NO:335), DOM4-130-123 (SEQ ID NO:336), DOM4-130-124 (SEQ ID NO:337), DOM4-130-125 (SEQ ID NO:338), DOM4-130-126 (SEQ ID NO:339), DOM4-130-127 (SEQ ID NO:340), DOM4-130-128 (SEQ ID NO:341), DOM4-130-129 (SEQ ID NO:342), DOM4-130-130 (SEQ ID NO:343), DOM4-130-131 (SEQ ID NO:344), DOM4-130-132 (SEQ ID NO:345), DOM4-130-133 (SEQ ID NO:346), DOM4-131 (SEQ ID NO:347), DOM4-132 (SEQ ID NO:348), and DOM4-133 (SEQ ID NO:349).

36. The use of any one of claims 32-35, said half-life extending moiety is serum albumin or a fragment thereof, transferrin receptor or a transferrin-binding portion thereof, or an antibody or antibody fragment comprising a binding site for a polypeptide that enhances half-life in vivo.

37. The use of claim 36, wherein said half-life extending moiety is an antibody or antibody fragment comprising a binding site for serum albumin or neonatal Fc receptor.

38. The use of claim 37, wherein said antibody or antibody fragment is an antibody fragment, and said antibody fragment is an immunoglobulin single variable domain.

39. The use of claim 38, wherein said immunoglobulin single variable domain competes with an immunoglobulin single variable domain selected from the group consisting of DOM7m-16 (SEQ ID NO:723), DOM7m-12 (SEQ ID NO:724), DOM7m-26 (SEQ ID NO:725), DOM7r-1 (SEQ ID NO:726), DOM7r-3 (SEQ ID NO:727), DOM7r-4 (SEQ ID NO:728), DOM7r-5 (SEQ ID NO:729), DOM7r-7 (SEQ ID NO:730), DOM7r-8 (SEQ ID NO:731), DOM7h-2 (SEQ ID NO:732), DOM7h-3 (SEQ ID NO:733), DOM7h-4 (SEQ ID NO:734), DOM7h-6 (SEQ ID NO:735), DOM7h-1 (SEQ ID NO:736), DOM7h-7 (SEQ ID NO:737), DOM7h-22 (SEQ ID NO:739), DOM7h-23 (SEQ ID NO:740), DOM7h-24 (SEQ ID NO:741), DOM7h-25 (SEQ ID NO:742), DOM7h-26 (SEQ ID NO:743), DOM7h-21 (SEQ ID NO:744), DOM7h-27 (SEQ ID NO:745), DOM7h-8 (SEQ ID NO:746), DOM7r-13 (SEQ ID NO:747), DOM7r-14 (SEQ ID NO:748), DOM7r-15 (SEQ ID NO:749), DOM7r-16 (SEQ ID NO:750), DOM7r-17 (SEQ ID NO:751), DOM7r-18 (SEQ ID NO:752), DOM7r-19 (SEQ ID NO:753), DOM7r-20 (SEQ ID NO:754), DOM7r-21 (SEQ ID NO:755), DOM7r-22 (SEQ ID NO:756), DOM7r-23 (SEQ ID NO:757), DOM7r-24 (SEQ ID NO:758), DOM7r-25 (SEQ ID NO:759), DOM7r-26 (SEQ ID NO:760), DOM7r-27 (SEQ ID NO:761), DOM7r-28 (SEQ ID NO:762), DOM7r-29 (SEQ ID NO:763), DOM7r-30 (SEQ ID NO:764), DOM7r-31 (SEQ ID NO:765), DOM7r-32 (SEQ ID NO:766), DOM7r-33 (SEQ ID NO:767), Sequence A (SEQ ID NO:768), Sequence B (SEQ ID NO:769), Sequence C (SEQ ID NO:770), Sequence D (SEQ ID NO:771), Sequence E (SEQ ID NO:772), Sequence F (SEQ ID NO:773), Sequence G (SEQ ID NO:774), Sequence H (SEQ ID NO:775), Sequence I (SEQ ID NO:776), Sequence J (SEQ ID NO:777), Sequence K (SEQ ID NO:778), Sequence L (SEQ ID NO:779), Sequence M (SEQ ID NO:780), Sequence N (SEQ ID NO:781), Sequence O (SEQ ID NO:782), Sequence P (SEQ ID NO:783), and Sequence Q (SEQ ID NO:784) for binding to human serum albumin.

40. The use of claim 38, wherein said immunoglobulin single variable domain binds human serum albumin comprises an amino acid sequence selected from the group consisting of DOM7m-16 (SEQ ID NO:723), DOM7m-12 (SEQ ID NO:724), DOM7m-26 (SEQ ID NO:725), DOM7r-1 (SEQ ID NO:726), DOM7r-3 (SEQ ID NO:727), DOM7r-4 (SEQ ID NO:728), DOM7r-5 (SEQ ID NO:729), DOM7r-7 (SEQ ID NO:730), DOM7r-8 (SEQ ID NO:731), DOM7h-2 (SEQ ID NO:732), DOM7h-3 (SEQ ID NO:733), DOM7h-4 (SEQ ID NO:734), DOM7h-6 (SEQ ID NO:735), DOM7h-1 (SEQ ID NO:736), DOM7h-7 (SEQ ID NO:737), DOM7h-22 (SEQ ID NO:739), DOM7h-23 (SEQ ID NO:740), DOM7h-24 (SEQ ID NO:741), DOM7h-25 (SEQ ID NO:742), DOM7h-26 (SEQ ID NO:743), DOM7h-21 (SEQ ID NO:744), DOM7h-27 (SEQ ID NO:745), DOM7h-8 (SEQ ID NO:746), DOM7r-13 (SEQ ID NO:747), DOM7r-14 (SEQ ID NO:748), DOM7r-15 (SEQ ID NO:749), DOM7r-16 (SEQ ID NO:750), DOM7r-17 (SEQ ID NO:751), DOM7r-18 (SEQ ID NO:752), DOM7r-19 (SEQ ID NO:753), DOM7r-20 (SEQ ID NO:754), DOM7r-21 (SEQ ID NO:755), DOM7r-22 (SEQ ID NO:756), DOM7r-23 (SEQ ID NO:757), DOM7r-24 (SEQ ID NO:758), DOM7r-25 (SEQ ID NO:759), DOM7r-26 (SEQ ID NO:760), DOM7r-27 (SEQ ID NO:761), DOM7r-28 (SEQ ID NO:762), DOM7r-29 (SEQ ID NO:763), DOM7r-30 (SEQ ID NO:764), DOM7r-31 (SEQ ID NO:765), DOM7r-32 (SEQ ID NO:766), DOM7r-33 (SEQ ID NO:767), Sequence A (SEQ ID NO:768), Sequence B (SEQ ID NO:769), Sequence C (SEQ ID NO:770), Sequence D (SEQ ID NO:771), Sequence E (SEQ ID NO:772), Sequence F (SEQ ID NO:773), Sequence G (SEQ ID NO:774), Sequence H (SEQ ID NO:775), Sequence I (SEQ ID NO:776), Sequence J (SEQ ID NO:777), Sequence K (SEQ ID NO:778), Sequence L (SEQ ID NO:779), Sequence M (SEQ ID NO:780), Sequence N (SEQ ID NO:781), Sequence O (SEQ ID NO:782), Sequence P (SEQ ID NO:783), and Sequence Q (SEQ ID NO:784).

41. The use of any one of claims 32-40, wherein said respiratory disease is selected from the group consisting of lung inflammation, chronic obstructive pulmonary disease, asthma, pneumonia, hypersensitivity pneumonitis, pulmonary infiltrate with eosinophilia, environmental lung disease, pneumonia, bronchiectasis, cystic fibrosis, interstitial lung disease, primary pulmonary hypertension, pulmonary thromboembolism, disorders of the pleura, disorders of the mediastinum, disorders of the diaphragm, hypoventilation, hyperventilation, sleep apnea, acute respiratory distress syndrome, mesothelioma, sarcoma, graft rejection, graft versus host disease, lung cancer, allergic rhinitis, allergy, asbestosis, aspergilloma, aspergillosis, bronchiectasis, chronic bronchitis, emphysema, eosinophilic pneumonia, idiopathic pulmonary fibrosis, invasive pneumococcal disease, influenza, nontuberculous mycobacteria, pleural effusion, pneumoconiosis, pneumocytosis, pneumonia, pulmonary actinomycosis, pulmonary alveolar proteinosis, pulmonary anthrax, pulmonary edema, pulmonary embolus, pulmonary inflammation, pulmonary histiocytosis X, pulmonary hypertension, pulmonary nocardiosis, pulmonary tuberculosis, pulmonary veno-occlusive disease, rheumatoid lung disease, sarcoidosis, and Wegener's granulomatosis.

42. Use of an antagonist of Interleukin-1 Receptor Type 1 (IL-1R1) for the manufacture of a medicament for treating a respiratory disease, wherein said antagonist of IL-1R1 comprises an immunoglobulin single variable domain that has binding specificity for human IL-1R1 and inhibits binding of Interleukin-1 (IL-1) to human IL-1R1, and a polyethylene glycol moiety.

43. The use of claim 42, wherein said immunoglobulin single variable domain competes for binding to human IL-1R1 with an immunoglobulin single variable domain selected from the group consisting of DOM4-122-23 (SEQ ID NO:1), DOM4-122-24 (SEQ ID NO:2), DOM4-130-30 (SEQ ID NO:3), DOM4-130-46 (SEQ ID NO:4), DOM4-130-51 (SEQ ID NO:5), DOM4-130-53 (SEQ ID NO:6), DOM4-130-54 (SEQ ID NO:7), DOM4-1 (SEQ ID NO:8), DOM4-2 (SEQ ID NO:9), DOM4-3 (SEQ ID NO:10), DOM4-4 (SEQ ID NO:11), DOM4-5 (SEQ ID NO:12), DOM4-6 (SEQ ID NO:13), DOM4-7 (SEQ ID NO:14), DOM4-8 (SEQ ID NO:15), DOM4-9 (SEQ ID NO:16), DOM4-10 (SEQ ID NO:17), DOM4-11 (SEQ ID NO:18), DOM4-12 (SEQ ID NO:19), DOM4-13 (SEQ ID NO:20), DOM4-14 (SEQ ID NO:21), DOM4-15 (SEQ ID NO:22), DOM4-20 (SEQ ID NO:23), DOM4-21 (SEQ ID NO:24), DOM4-22 (SEQ ID NO:25), DOM4-23 (SEQ ID NO:26), DOM4-25 (SEQ ID NO:27), DOM4-26 (SEQ ID NO:28), DOM4-27 (SEQ ID NO:29), DOM4-28 (SEQ ID NO:30), DOM4-29 (SEQ ID NO:31), DOM4-31 (SEQ ID NO:32), DOM4-32 (SEQ ID NO:33), DOM4-33 (SEQ ID NO:34), DOM4-34 (SEQ ID NO:35), DOM4-36 (SEQ ID NO:36), DOM4-37 (SEQ ID NO:37), DOM4-38 (SEQ ID NO:38), DOM4-39 (SEQ ID NO:39), DOM4-40 (SEQ ID NO:40), DOM4-41 (SEQ ID NO:41), DOM4-42 (SEQ ID NO:42), DOM4-44 (SEQ ID NO:43), DOM4-45 (SEQ ID NO:44), DOM4-46 (SEQ ID NO:45), DOM4-49 (SEQ ID NO:46), DOM4-50 (SEQ ID NO:47), DOM4-74 (SEQ ID NO:48), DOM4-75 (SEQ ID NO:49), DOM4-76 (SEQ ID NO:50), DOM4-78 (SEQ ID NO:51), DOM4-79 (SEQ ID NO:52), DOM4-80 (SEQ ID NO:53), DOM4-81 (SEQ ID NO:54), DOM4-82 (SEQ ID NO:55), DOM4-83 (SEQ ID NO:56), DOM4-84 (SEQ ID NO:57), DOM4-85 (SEQ ID NO:58), DOM4-86 (SEQ ID NO:59), DOM4-87 (SEQ ID NO:60), DOM4-88 (SEQ ID NO:61), DOM4-89 (SEQ ID NO:62), DOM4-90 (SEQ ID NO:63), DOM4-91 (SEQ ID NO:64), DOM4-92 (SEQ ID NO:65), DOM4-93 (SEQ ID NO:66), DOM4-94 (SEQ ID NO:67), DOM4-95 (SEQ ID NO:68), DOM4-96 (SEQ ID NO:69), DOM4-97 (SEQ ID NO:70), DOM4-98 (SEQ ID NO:71), DOM4-99 (SEQ ID NO:72), DOM4-100 (SEQ ID NO:73), DOM4-101 (SEQ ID NO:74), DOM4-102 (SEQ ID NO:75), DOM4-103 (SEQ ID NO:76), DOM4-104 (SEQ ID NO:77), DOM4-105 (SEQ ID NO:78), DOM4-106 (SEQ ID NO:79), DOM4-107 (SEQ ID NO:80), DOM4-108 (SEQ ID NO:81), DOM4-109 (SEQ ID NO:82), DOM4-110 (SEQ ID NO:83), DOM4-111 (SEQ ID NO:84), DOM4-112 (SEQ ID NO:85), DOM4-113 (SEQ ID NO:86), DOM4-114 (SEQ ID NO:87), DOM4-115 (SEQ ID NO:88), DOM4-116 (SEQ ID NO:89), DOM4-117 (SEQ ID NO:90), DOM4-118 (SEQ ID NO:91), DOM4-119 (SEQ ID NO:92), DOM4-120 (SEQ ID NO:93), DOM4-121 (SEQ ID NO:94), DOM4-122 (SEQ ID NO:95), DOM4-122-1 (SEQ ID NO:96), DOM4-122-2 (SEQ ID NO:97), DOM4-122-3 (SEQ ID NO:98), DOM4-122-4 (SEQ ID NO:99), DOM4-122-5 (SEQ ID NO:100), DOM4-122-6 (SEQ ID NO:101), DOM4-122-7 (SEQ ID NO:102), DOM4-122-8 (SEQ ID NO:103), DOM4-122-9 (SEQ ID NO:104), DOM4-122-10 (SEQ ID NO:105), DOM4-122-11 (SEQ ID NO:106), DOM4-122-12 (SEQ ID NO:107), DOM4-122-13 (SEQ ID NO:108), DOM4-122-14 (SEQ ID NO:109), DOM4-122-15 (SEQ ID NO:110), DOM4-122-16 (SEQ ID NO:111), DOM4-122-17 (SEQ ID NO:112), DOM4-122-18 (SEQ ID NO:113), DOM4-122-19 (SEQ ID NO:114), DOM4-122-20 (SEQ ID NO:115), DOM4-122-21 (SEQ ID NO:116), DOM4-122-22 (SEQ ID NO:117), DOM4-122-25 (SEQ ID NO:118), DOM4-122-26 (SEQ ID NO:119), DOM4-122-27 (SEQ ID NO:120), DOM4-122-28 (SEQ ID NO:121), DOM4-122-29 (SEQ ID NO:122), DOM4-122-30 (SEQ ID NO:123), DOM4-122-31 (SEQ ID NO:124), DOM4-122-32 (SEQ ID NO:125), DOM4-122-33 (SEQ ID NO:126), DOM4-122-34 (SEQ ID NO:127), DOM4-122-35 (SEQ ID NO:128), DOM4-122-36 (SEQ ID NO:129), DOM4-122-37 (SEQ ID NO:130), DOM4-122-38 (SEQ ID NO:131), DOM4-122-39 (SEQ ID NO:132), DOM4-122-40 (SEQ ID NO:133), DOM4-122-41 (SEQ ID NO:134), DOM4-122-42 (SEQ ID NO:135), DOM4-122-43 (SEQ ID NO:136), DOM4-122-44 (SEQ ID NO:137), DOM4-122-45 (SEQ ID NO:138), DOM4-122-46 (SEQ ID NO:139), DOM4-122-47 (SEQ ID NO:140), DOM4-122-48 (SEQ ID NO:141), DOM4-122-49 (SEQ ID NO:142), DOM4-122-50 (SEQ ID NO:143), DOM4-122-51 (SEQ ID NO:144), DOM4-122-52 (SEQ ID NO:145), DOM4-122-54 (SEQ ID NO:146), DOM4-122-55 (SEQ ID NO:147), DOM4-122-56 (SEQ ID NO:148), DOM4-122-57 (SEQ ID NO:149), DOM4-122-58 (SEQ ID NO:150), DOM4-122-59 (SEQ ID NO:151), DOM4-122-60 (SEQ ID NO:152), DOM4-122-61 (SEQ ID NO:153), DOM4-122-62 (SEQ ID NO:154), DOM4-122-63 (SEQ ID NO:155), DOM4-122-64 (SEQ ID NO:156), DOM4-122-65 (SEQ ID NO:157), DOM4-122-66 (SEQ ID NO:158), DOM4-122-67 (SEQ ID NO:159), DOM4-122-68 (SEQ ID NO:160), DOM4-122-69 (SEQ ID NO:161), DOM4-122-70 (SEQ ID NO:162), DOM4-122-71 (SEQ ID NO:163), DOM4-122-72 (SEQ ID NO:164), DOM4-122-73 (SEQ ID NO:165), DOM4-123 (SEQ ID NO:166), DOM4-124 (SEQ ID NO:167) DOM4-125 (SEQ ID NO:168), DOM4-126 (SEQ ID NO:169), DOM4-127 (SEQ ID NO:170), DOM4-128 (SEQ ID NO:171), DOM4-129 (SEQ ID NO:172), DOM4-129-1 (SEQ ID NO:173), DOM4-129-2 (SEQ ID NO:174), DOM4-129-3 (SEQ ID NO:175), DOM4-129-4 (SEQ ID NO:176), DOM4-129-5 (SEQ ID NO:177), DOM4-129-6 (SEQ ID NO:178), DOM4-129-7 (SEQ ID NO:179), DOM4-129-8 (SEQ ID NO:180), DOM4-129-9 (SEQ ID NO:181), DOM4-129-10 (SEQ ID NO:182), DOM4-129-11 (SEQ ID NO:183), DOM4-129-12 (SEQ ID NO:184), DOM4-129-13 (SEQ ID NO:185), DOM4-129-14 (SEQ ID NO:186), DOM4-129-15 (SEQ ID NO:187), DOM4-129-16 (SEQ ID NO:188), DOM4-129-17 (SEQ ID NO:189), DOM4-129-18 (SEQ ID NO:190), DOM4-129-19 (SEQ ID NO:191), DOM4-129-20 (SEQ ID NO:192), DOM4-129-21 (SEQ ID NO:193), DOM4-129-22 (SEQ ID NO:194), DOM4-129-23 (SEQ ID NO:195), DOM4-129-24 (SEQ ID NO:196), DOM4-129-25 (SEQ ID NO:197), DOM4-129-26 (SEQ ID NO:198), DOM4-129-27 (SEQ ID NO:199), DOM4-129-28 (SEQ ID NO:200), DOM4-129-29 (SEQ ID NO:201), DOM4-129-31 (SEQ ID NO:202), DOM4-129-32 (SEQ ID NO:203), DOM4-129-33 (SEQ ID NO:204), DOM4-129-34 (SEQ ID NO:205), DOM4-129-35 (SEQ ID NO:206), DOM4-129-37 (SEQ ID NO:207), DOM4-129-38 (SEQ ID NO:208), DOM4-129-39 (SEQ ID NO:209), DOM4-129-40 (SEQ ID NO:210), DOM4-129-41 (SEQ ID NO:211), DOM4-129-42 (SEQ ID NO:212), DOM4-129-43 (SEQ ID NO:213), DOM4-129-44 (SEQ ID NO:214), DOM4-130 (SEQ ID NO:215), DOM4-130-1 (SEQ ID NO:216), DOM4-130-2 (SEQ ID NO:217), DOM4-130-3 (SEQ ID NO:218), DOM4-130-4 (SEQ ID NO:219), DOM4-130-5 (SEQ ID NO:220), DOM4-130-6 (SEQ ID NO:221), DOM4-130-7 (SEQ ID NO:222), DOM4-130-8 (SEQ ID NO:223), DOM4-130-9 (SEQ ID NO:224), DOM4-130-10 (SEQ ID NO:225), DOM4-130-11 (SEQ ID NO:226), DOM4-130-12 (SEQ ID NO:227), DOM4-130-13 (SEQ ID NO:228), DOM4-130-14 (SEQ ID NO:229), DOM4-130-15 (SEQ ID NO:230), DOM4-130-16 (SEQ ID NO:231), DOM4-130-17 (SEQ ID NO:232), DOM4-130-18 (SEQ ID NO:233), DOM4-130-19 (SEQ ID NO:234), DOM4-130-20 (SEQ ID NO:235), DOM4-130-21 (SEQ ID NO:236), DOM4-130-22 (SEQ ID NO:237), DOM4-130-23 (SEQ ID NO:238), DOM4-130-24 (SEQ ID NO:239), DOM4-130-25 (SEQ ID NO:240), DOM4-130-26 (SEQ ID NO:241), DOM4-130-27 (SEQ ID NO:242), DOM4-130-28 (SEQ ID NO:243), DOM4-130-31 (SEQ ID NO:244), DOM4-130-32 (SEQ ID NO:245), DOM4-130-33 (SEQ ID NO:246), DOM4-130-34 (SEQ ID NO:247), DOM4-130-35 (SEQ ID NO:248), DOM4-130-36 (SEQ ID NO:249), DOM4-130-37 (SEQ ID NO:250), DOM4-130-38 (SEQ ID NO:251), DOM4-130-39 (SEQ ID NO:252), DOM4-130-40 (SEQ ID NO:253), DOM4-130-41 (SEQ ID NO:254), DOM4-130-42 (SEQ ID NO:255), DOM4-130-43 (SEQ ID NO:256), DOM4-130-44 (SEQ ID NO:257), DOM4-130-45 (SEQ ID NO:258), DOM4-130-46 (SEQ ID NO:259), DOM4-130-47 (SEQ ID NO:260), DOM4-130-48 (SEQ ID NO:261), DOM4-130-49 (SEQ ID NO:262), DOM4-130-50 (SEQ ID NO:263), DOM4-130-51 (SEQ ID NO:264), DOM4-130-52 (SEQ ID NO:265), DOM4-130-53 (SEQ ID NO:266), DOM4-130-54 (SEQ ID NO:267), DOM4-130-55 (SEQ ID NO:268), DOM4-130-56 (SEQ ID NO:269), DOM4-130-57 (SEQ ID NO:270), DOM4-130-58 (SEQ ID NO:271), DOM4-130-59 (SEQ ID NO:272), DOM4-130-60 (SEQ ID NO:273), DOM4-130-61 (SEQ ID NO:274), DOM4-130-62 (SEQ ID NO:275), DOM4-130-63 (SEQ ID NO:276), DOM4-130-64 (SEQ ID NO:277), DOM4-130-65 (SEQ ID NO:278), DOM4-130-66 (SEQ ID NO:279), DOM4-130-67 (SEQ ID NO:280), DOM4-130-68 (SEQ ID NO:281), DOM4-130-69 (SEQ ID NO:282), DOM4-130-70 (SEQ ID NO:283), DOM4-130-71 (SEQ ID NO:284), DOM4-130-72 (SEQ ID NO:285), DOM4-130-73 (SEQ ID NO:286), DOM4-130-74 (SEQ ID NO:287), DOM4-130-75 (SEQ ID NO:288), DOM4-130-76 (SEQ ID NO:289), DOM4-130-77 (SEQ ID NO:290), DOM4-130-78 (SEQ ID NO:291), DOM4-130-79 (SEQ ID NO:292), DOM4-130-80 (SEQ ID NO:293), DOM4-130-81 (SEQ ID NO:294), DOM4-130-82 (SEQ ID NO:295), DOM4-130-83 (SEQ ID NO:296), DOM4-130-84 (SEQ ID NO:297), DOM4-130-85 (SEQ ID NO:298), DOM4-130-86 (SEQ ID NO:299), DOM4-130-87 (SEQ ID NO:300), DOM4-130-88 (SEQ ID NO:301), DOM4-130-89 (SEQ ID NO:302), DOM4-130-90 (SEQ ID NO:303), DOM4-130-91 (SEQ ID NO:304), DOM4-130-92 (SEQ ID NO:305), DOM4-130-93 (SEQ ID NO:306), DOM4-130-94 (SEQ ID NO:307), DOM4-130-95 (SEQ ID NO:308), DOM4-130-96 (SEQ ID NO:309), DOM4-130-97 (SEQ ID NO:310), DOM4-130-98 (SEQ ID NO:311), DOM4-130-99 (SEQ ID NO:312), DOM4-130-100 (SEQ ID NO:313), DOM4-130-101 (SEQ ID NO:314), DOM4-130-102 (SEQ ID NO:315), DOM4-130-103 (SEQ ID NO:316), DOM4-130-104 (SEQ ID NO:317), DOM4-130-105 (SEQ ID NO:318), DOM4-130-106 (SEQ ID NO:319), DOM4-130-107 (SEQ ID NO:320), DOM4-130-108 (SEQ ID NO:321), DOM4-130-109 (SEQ ID NO:322), DOM4-130-110 (SEQ ID NO:323), DOM4-130-111 (SEQ ID NO:324), DOM4-130-112 (SEQ ID NO:325), DOM4-130-113 (SEQ ID NO:326), DOM4-130-114 (SEQ ID NO:327), DOM4-130-115 (SEQ ID NO:328), DOM4-130-116 (SEQ ID NO:329), DOM4-130-117 (SEQ ID NO:330), DOM4-130-118 (SEQ ID NO:331), DOM4-130-119 (SEQ ID NO:332), DOM4-130-120 (SEQ ID NO:333), DOM4-130-121 (SEQ ID NO:334), DOM4-130-122 (SEQ ID NO:335), DOM4-130-123 (SEQ ID NO:336), DOM4-130-124 (SEQ ID NO:337), DOM4-130-125 (SEQ ID NO:338), DOM4-130-126 (SEQ ID NO:339), DOM4-130-127 (SEQ ID NO:340), DOM4-130-128 (SEQ ID NO:341), DOM4-130-129 (SEQ ID NO:342), DOM4-130-130 (SEQ ID NO:343), DOM4-130-131 (SEQ ID NO:344), DOM4-130-132 (SEQ ID NO:345), DOM4-130-133 (SEQ ID NO:346), DOM4-131 (SEQ ID NO:347), DOM4-132 (SEQ ID NO:348), and DOM4-133 (SEQ ID NO:349).

44. The use of claim 42, wherein said immunoglobulin single variable domain binds human serum albumin comprises an amino acid sequence selected from the group consisting of DOM4-122-23 (SEQ ID NO:1), DOM4-122-24 (SEQ ID NO:2), DOM4-130-30 (SEQ ID NO:3), DOM4-130-46 (SEQ ID NO:4), DOM4-130-51 (SEQ ID NO:5), DOM4-130-53 (SEQ ID NO:6), DOM4-130-54 (SEQ ID NO:7), DOM4-1 (SEQ ID NO:8), DOM4-2 (SEQ ID NO:9), DOM4-3 (SEQ ID NO:10), DOM4-4 (SEQ ID NO:11), DOM4-5 (SEQ ID NO:12), DOM4-6 (SEQ ID NO:13), DOM4-7 (SEQ ID NO:14), DOM4-8 (SEQ ID NO:15), DOM4-9 (SEQ ID NO:16), DOM4-10 (SEQ ID NO:17), DOM4-11 (SEQ ID NO:18), DOM4-12 (SEQ ID NO:19), DOM4-13 (SEQ ID NO:20), DOM4-14 (SEQ ID NO:21), DOM4-15 (SEQ ID NO:22), DOM4-20 (SEQ ID NO:23), DOM4-21 (SEQ ID NO:24), DOM4-22 (SEQ ID NO:25), DOM4-23 (SEQ ID NO:26), DOM4-25 (SEQ ID NO:27), DOM4-26 (SEQ ID NO:28), DOM4-27 (SEQ ID NO:29), DOM4-28 (SEQ ID NO:30), DOM4-29 (SEQ ID NO:31), DOM4-31 (SEQ ID NO:32), DOM4-32 (SEQ ID NO:33), DOM4-33 (SEQ ID NO:34), DOM4-34 (SEQ ID NO:35), DOM4-36 (SEQ ID NO:36), DOM4-37 (SEQ ID NO:37), DOM4-38 (SEQ ID NO:38), DOM4-39 (SEQ ID NO:39), DOM4-40 (SEQ ID NO:40), DOM4-41 (SEQ ID NO:41), DOM4-42 (SEQ ID NO:42), DOM4-44 (SEQ ID NO:43), DOM4-45 (SEQ ID NO:44), DOM4-46 (SEQ ID NO:45), DOM4-49 (SEQ ID NO:46), DOM4-50 (SEQ ID NO:47), DOM4-74 (SEQ ID NO:48), DOM4-75 (SEQ ID NO:49), DOM4-76 (SEQ ID NO:50), DOM4-78 (SEQ ID NO:51), DOM4-79 (SEQ ID NO:52), DOM4-80 (SEQ ID NO:53), DOM4-81 (SEQ ID NO:54), DOM4-82 (SEQ ID NO:55), DOM4-83 (SEQ ID NO:56), DOM4-84 (SEQ ID NO:57), DOM4-85 (SEQ ID NO:58), DOM4-86 (SEQ ID NO:59), DOM4-87 (SEQ ID NO:60), DOM4-88 (SEQ ID NO:61), DOM4-89 (SEQ ID NO:62), DOM4-90 (SEQ ID NO:63), DOM4-91 (SEQ ID NO:64), DOM4-92 (SEQ ID NO:65), DOM4-93 (SEQ ID NO:66), DOM4-94 (SEQ ID NO:67), DOM4-95 (SEQ ID NO:68), DOM4-96 (SEQ ID NO:69), DOM4-97 (SEQ ID NO:70), DOM4-98 (SEQ ID NO:71), DOM4-99 (SEQ ID NO:72), DOM4-100 (SEQ ID NO:73), DOM4-101 (SEQ ID NO:74), DOM4-102 (SEQ ID NO:75), DOM4-103 (SEQ ID NO:76), DOM4-104 (SEQ ID NO:77), DOM4-105 (SEQ ID NO:78), DOM4-106 (SEQ ID NO:79), DOM4-107 (SEQ ID NO:80), DOM4-108 (SEQ ID NO:81), DOM4-109 (SEQ ID NO:82), DOM4-110 (SEQ ID NO:83), DOM4-111 (SEQ ID NO:84), DOM4-112 (SEQ ID NO:85), DOM4-113 (SEQ ID NO:86), DOM4-114 (SEQ ID NO:87), DOM4-115 (SEQ ID NO:88), DOM4-116 (SEQ ID NO:89), DOM4-117 (SEQ ID NO:90), DOM4-118 (SEQ ID NO:91), DOM4-119 (SEQ ID NO:92), DOM4-120 (SEQ ID NO:93), DOM4-121 (SEQ ID NO:94), DOM4-122 (SEQ ID NO:95), DOM4-122-1 (SEQ ID NO:96), DOM4-122-2 (SEQ ID NO:97), DOM4-122-3 (SEQ ID NO:98), DOM4-122-4 (SEQ ID NO:99), DOM4-122-5 (SEQ ID NO:100), DOM4-122-6 (SEQ ID NO:101), DOM4-122-7 (SEQ ID NO:102), DOM4-122-8 (SEQ ID NO:103), DOM4-122-9 (SEQ ID NO:104), DOM4-122-10 (SEQ ID NO:105), DOM4-122-11 (SEQ ID NO:106), DOM4-122-12 (SEQ ID NO:107), DOM4-122-13 (SEQ ID NO:108), DOM4-122-14 (SEQ ID NO:109), DOM4-122-15 (SEQ ID NO:110), DOM4-122-16 (SEQ ID NO:111), DOM4-122-17 (SEQ ID NO:112), DOM4-122-18 (SEQ ID NO:113), DOM4-122-19 (SEQ ID NO:114), DOM4-122-20 (SEQ ID NO:115), DOM4-122-21 (SEQ ID NO:116), DOM4-122-22 (SEQ ID NO:117), DOM4-122-25 (SEQ ID NO:118), DOM4-122-26 (SEQ ID NO:119), DOM4-122-27 (SEQ ID NO:120), DOM4-122-28 (SEQ ID NO:121), DOM4-122-29 (SEQ ID NO:122), DOM4-122-30 (SEQ ID NO:123), DOM4-122-31 (SEQ ID NO:124), DOM4-122-32 (SEQ ID NO:125), DOM4-122-33 (SEQ ID NO:126), DOM4-122-34 (SEQ ID NO:127), DOM4-122-35 (SEQ ID NO:128), DOM4-122-36 (SEQ ID NO:129), DOM4-122-37 (SEQ ID NO:130), DOM4-122-38 (SEQ ID NO:131), DOM4-122-39 (SEQ ID NO:132), DOM4-122-40 (SEQ ID NO:133), DOM4-122-41 (SEQ ID NO:134), DOM4-122-42 (SEQ ID NO:135), DOM4-122-43 (SEQ ID NO:136), DOM4-122-44 (SEQ ID NO:137), DOM4-122-45 (SEQ ID NO:138), DOM4-122-46 (SEQ ID NO:139), DOM4-122-47 (SEQ ID NO:140), DOM4-122-48 (SEQ ID NO:141), DOM4-122-49 (SEQ ID NO:142), DOM4-122-50 (SEQ ID NO:143), DOM4-122-51 (SEQ ID NO:144), DOM4-122-52 (SEQ ID NO:145), DOM4-122-54 (SEQ ID NO:146), DOM4-122-55 (SEQ ID NO:147), DOM4-122-56 (SEQ ID NO:148), DOM4-122-57 (SEQ ID NO:149), DOM4-122-58 (SEQ ID NO:150), DOM4-122-59 (SEQ ID NO:151), DOM4-122-60 (SEQ ID NO:152), DOM4-122-61 (SEQ ID NO:153), DOM4-122-62 (SEQ ID NO:154), DOM4-122-63 (SEQ ID NO:155), DOM4-122-64 (SEQ ID NO:156), DOM4-122-65 (SEQ ID NO:157), DOM4-122-66 (SEQ ID NO:158), DOM4-122-67 (SEQ ID NO:159), DOM4-122-68 (SEQ ID NO:160), DOM4-122-69 (SEQ ID NO:161), DOM4-122-70 (SEQ ID NO:162), DOM4-122-71 (SEQ ID NO:163), DOM4-122-72 (SEQ ID NO:164), DOM4-122-73 (SEQ ID NO:165), DOM4-123 (SEQ ID NO:166), DOM4-124 (SEQ ID NO:167) DOM4-125 (SEQ ID NO:168), DOM4-126 (SEQ ID NO:169), DOM4-127 (SEQ ID NO:170), DOM4-128 (SEQ ID NO:171), DOM4-129 (SEQ ID NO:172), DOM4-129-1 (SEQ ID NO:173), DOM4-129-2 (SEQ ID NO:174), DOM4-129-3 (SEQ ID NO:175), DOM4-129-4 (SEQ ID NO:176), DOM4-129-5 (SEQ ID NO:177), DOM4-129-6 (SEQ ID NO:178), DOM4-129-7 (SEQ ID NO:179), DOM4-129-8 (SEQ ID NO:180), DOM4-129-9 (SEQ ID NO:181), DOM4-129-10 (SEQ ID NO:182), DOM4-129-11 (SEQ ID NO:183), DOM4-129-12 (SEQ ID NO:184), DOM4-129-13 (SEQ ID NO:185), DOM4-129-14 (SEQ ID NO:186), DOM4-129-15 (SEQ ID NO:187), DOM4-129-16 (SEQ ID NO:188), DOM4-129-17 (SEQ ID NO:189), DOM4-129-18 (SEQ ID NO:190), DOM4-129-19 (SEQ ID NO:191), DOM4-129-20 (SEQ ID NO:192), DOM4-129-21 (SEQ ID NO:193), DOM4-129-22 (SEQ ID NO:194), DOM4-129-23 (SEQ ID NO:195), DOM4-129-24 (SEQ ID NO:196), DOM4-129-25 (SEQ ID NO:197), DOM4-129-26 (SEQ ID NO:198), DOM4-129-27 (SEQ ID NO:199), DOM4-129-28 (SEQ ID NO:200), DOM4-129-29 (SEQ ID NO:201), DOM4-129-31 (SEQ ID NO:202), DOM4-129-32 (SEQ ID NO:203), DOM4-129-33 (SEQ ID NO:204), DOM4-129-34 (SEQ ID NO:205), DOM4-129-35 (SEQ ID NO:206), DOM4-129-37 (SEQ ID NO:207), DOM4-129-38 (SEQ ID NO:208), DOM4-129-39 (SEQ ID NO:209), DOM4-129-40 (SEQ ID NO:210), DOM4-129-41 (SEQ ID NO:211), DOM4-129-42 (SEQ ID NO:212), DOM4-129-43 (SEQ ID NO:213), DOM4-129-44 (SEQ ID NO:214), DOM4-130 (SEQ ID NO:215), DOM4-130-1 (SEQ ID NO:216), DOM4-130-2 (SEQ ID NO:217), DOM4-130-3 (SEQ ID NO:218), DOM4-130-4 (SEQ ID NO:219), DOM4-130-5 (SEQ ID NO:220), DOM4-130-6 (SEQ ID NO:221), DOM4-130-7 (SEQ ID NO:222), DOM4-130-8 (SEQ ID NO:223), DOM4-130-9 (SEQ ID NO:224), DOM4-130-10 (SEQ ID NO:225), DOM4-130-11 (SEQ ID NO:226), DOM4-130-12 (SEQ ID NO:227), DOM4-130-13 (SEQ ID NO:228), DOM4-130-14 (SEQ ID NO:229), DOM4-130-15 (SEQ ID NO:230), DOM4-130-16 (SEQ ID NO:231), DOM4-130-17 (SEQ ID NO:232), DOM4-130-18 (SEQ ID NO:233), DOM4-130-19 (SEQ ID NO:234), DOM4-130-20 (SEQ ID NO:235), DOM4-130-21 (SEQ ID NO:236), DOM4-130-22 (SEQ ID NO:237), DOM4-130-23 (SEQ ID NO:238), DOM4-130-24 (SEQ ID NO:239), DOM4-130-25 (SEQ ID NO:240), DOM4-130-26 (SEQ ID NO:241), DOM4-130-27 (SEQ ID NO:242), DOM4-130-28 (SEQ ID NO:243), DOM4-130-31 (SEQ ID NO:244), DOM4-130-32 (SEQ ID NO:245), DOM4-130-33 (SEQ ID NO:246), DOM4-130-34 (SEQ ID NO:247), DOM4-130-35 (SEQ ID NO:248), DOM4-130-36 (SEQ ID NO:249), DOM4-130-37 (SEQ ID NO:250), DOM4-130-38 (SEQ ID NO:251), DOM4-130-39 (SEQ ID NO:252), DOM4-130-40 (SEQ ID NO:253), DOM4-130-41 (SEQ ID NO:254), DOM4-130-42 (SEQ ID NO:255), DOM4-130-43 (SEQ ID NO:256), DOM4-130-44 (SEQ ID NO:257), DOM4-130-45 (SEQ ID NO:258), DOM4-130-46 (SEQ ID NO:259), DOM4-130-47 (SEQ ID NO:260), DOM4-130-48 (SEQ ID NO:261), DOM4-130-49 (SEQ ID NO:262), DOM4-130-50 (SEQ ID NO:263), DOM4-130-51 (SEQ ID NO:264), DOM4-130-52 (SEQ ID NO:265), DOM4-130-53 (SEQ ID NO:266), DOM4-130-54 (SEQ ID NO:267), DOM4-130-55 (SEQ ID NO:268), DOM4-130-56 (SEQ ID NO:269), DOM4-130-57 (SEQ ID NO:270), DOM4-130-58 (SEQ ID NO:271), DOM4-130-59 (SEQ ID NO:272), DOM4-130-60 (SEQ ID NO:273), DOM4-130-61 (SEQ ID NO:274), DOM4-130-62 (SEQ ID NO:275), DOM4-130-63 (SEQ ID NO:276), DOM4-130-64 (SEQ ID NO:277), DOM4-130-65 (SEQ ID NO:278), DOM4-130-66 (SEQ ID NO:279), DOM4-130-67 (SEQ ID NO:280), DOM4-130-68 (SEQ ID NO:281), DOM4-130-69 (SEQ ID NO:282), DOM4-130-70 (SEQ ID NO:283), DOM4-130-71 (SEQ ID NO:284), DOM4-130-72 (SEQ ID NO:285), DOM4-130-73 (SEQ ID NO:286), DOM4-130-74 (SEQ ID NO:287), DOM4-130-75 (SEQ ID NO:288), DOM4-130-76 (SEQ ID NO:289), DOM4-130-77 (SEQ ID NO:290), DOM4-130-78 (SEQ ID NO:291), DOM4-130-79 (SEQ ID NO:292), DOM4-130-80 (SEQ ID NO:293), DOM4-130-81 (SEQ ID NO:294), DOM4-130-82 (SEQ ID NO:295), DOM4-130-83 (SEQ ID NO:296), DOM4-130-84 (SEQ ID NO:297), DOM4-130-85 (SEQ ID NO:298), DOM4-130-86 (SEQ ID NO:299), DOM4-130-87 (SEQ ID NO:300), DOM4-130-88 (SEQ ID NO:301), DOM4-130-89 (SEQ ID NO:302), DOM4-130-90 (SEQ ID NO:303), DOM4-130-91 (SEQ ID NO:304), DOM4-130-92 (SEQ ID NO:305), DOM4-130-93 (SEQ ID NO:306), DOM4-130-94 (SEQ ID NO:307), DOM4-130-95 (SEQ ID NO:308), DOM4-130-96 (SEQ ID NO:309), DOM4-130-97 (SEQ ID NO:310), DOM4-130-98 (SEQ ID NO:311), DOM4-130-99 (SEQ ID NO:312), DOM4-130-100 (SEQ ID NO:313), DOM4-130-101 (SEQ ID NO:314), DOM4-130-102 (SEQ ID NO:315), DOM4-130-103 (SEQ ID NO:316), DOM4-130-104 (SEQ ID NO:317), DOM4-130-105 (SEQ ID NO:318), DOM4-130-106 (SEQ ID NO:319), DOM4-130-107 (SEQ ID NO:320), DOM4-130-108 (SEQ ID NO:321), DOM4-130-109 (SEQ ID NO:322), DOM4-130-110 (SEQ ID NO:323), DOM4-130-111 (SEQ ID NO:324), DOM4-130-112 (SEQ ID NO:325), DOM4-130-113 (SEQ ID NO:326), DOM4-130-114 (SEQ ID NO:327), DOM4-130-115 (SEQ ID NO:328), DOM4-130-116 (SEQ ID NO:329), DOM4-130-117 (SEQ ID NO:330), DOM4-130-118 (SEQ ID NO:331), DOM4-130-119 (SEQ ID NO:332), DOM4-130-120 (SEQ ID NO:333), DOM4-130-121 (SEQ ID NO:334), DOM4-130-122 (SEQ ID NO:335), DOM4-130-123 (SEQ ID NO:336), DOM4-130-124 (SEQ ID NO:337), DOM4-130-125 (SEQ ID NO:338), DOM4-130-126 (SEQ ID NO:339), DOM4-130-127 (SEQ ID NO:340), DOM4-130-128 (SEQ ID NO:341), DOM4-130-129 (SEQ ID NO:342), DOM4-130-130 (SEQ ID NO:343), DOM4-130-131 (SEQ ID NO:344), DOM4-130-132 (SEQ ID NO:345), DOM4-130-133 (SEQ ID NO:346), DOM4-131 (SEQ ID NO:347), DOM4-132 (SEQ ID NO:348), and DOM4-133 (SEQ ID NO:349).

45. The use of any one of claims 42-44, wherein said respiratory disease is selected from the group consisting of lung inflammation, chronic obstructive pulmonary disease, asthma, pneumonia, hypersensitivity pneumonitis, pulmonary infiltrate with eosinophilia, environmental lung disease, pneumonia, bronchiectasis, cystic fibrosis, interstitial lung disease, primary pulmonary hypertension, pulmonary thromboembolism, disorders of the pleura, disorders of the mediastinum, disorders of the diaphragm, hypoventilation, hyperventilation, sleep apnea, acute respiratory distress syndrome, mesothelioma, sarcoma, graft rejection, graft versus host disease, lung cancer, allergic rhinitis, allergy, asbestosis, aspergilloma, aspergillosis, bronchiectasis, chronic bronchitis, emphysema, eosinophilic pneumonia, idiopathic pulmonary fibrosis, invasive pneumococcal disease, influenza, nontuberculous mycobacteria, pleural effusion, pneumoconiosis, pneumocytosis, pneumonia, pulmonary actinomycosis, pulmonary alveolar proteinosis, pulmonary anthrax, pulmonary edema, pulmonary embolus, pulmonary inflammation, pulmonary histiocytosis X, pulmonary hypertension, pulmonary nocardiosis, pulmonary tuberculosis, pulmonary veno-occlusive disease, rheumatoid lung disease, sarcoidosis, and Wegener's granulomatosis.

46. The use of any one of claims 1-45 wherein said IL-1 is selected from the group consisting of IL-1α and IL-1β.

47. A pharmaceutical composition comprising an antagonist of IL-1R1 and a physiologically acceptable carrier, wherein said antagonist of IL-1R1 is as described in any one of the previous claims.

48. A drug delivery device comprising the pharmaceutical composition of claims 47.

49. The drug deliver device of claim 48 wherein said drug delivery device is selected from the group consisting of a parenteral delivery device, intravenous delivery device, intramuscular delivery device, intraperitoneal delivery device, transdermal delivery device, pulmonary delivery device, intraarterial delivery device, intrathecal delivery device, intraarticular delivery device, subcutaneous delivery device, intranasal delivery device, vaginal delivery device, and rectal delivery device.

50. The drug delivery device of claim 49 wherein said device is selected from the group consisting of a syringe, a transdermal delivery device, a capsule, a tablet, a nebulizer, an inhaler, an atomizer, an aerosolizer, a mister, a dry powder inhaler, a metered dose inhaler, a metered dose sprayer, a metered dose mister, a metered dose atomizer, a catheter.

51. A method for treating a respiratory disease, comprising administering to a subject in need thereof a therapeutically effective amount of an antagonist of Interleukin-1 Receptor Type 1 (IL-1R1), wherein said antagonist of IL-1R1 comprises a polypeptide domain that has binding specificity for Interleukin-1 Receptor Type 1 (IL-1R1) and inhibits binding of Interleukin-1 (IL-1) to IL-1R1, and wherein said polypeptide domain that has binding specificity for IL-1R1 is selected from the group consisting of an antibody or antigen-binding fragment thereof, Interleukin-1 receptor antagonist (IL-1ra) or a functional variant of IL-1ra.

52. The method of claim 51, wherein said polypeptide domain that has binding specificity for IL-1R1 inhibits binding of said ligand to IL-1R1 with an IC50 that is ≦1 μM.

53. The method of claim 51, wherein said polypeptide domain that has binding specificity for IL-1R1 inhibits IL-1-induced release of Interleukin-8 by MRC-5 cells (ATCC Accession No. CCL-171) in an in vitro assay with a ND50 that is ≦1 μM.

54. The method of claim 53, wherein said polypeptide domain that has binding specificity for IL-1R1 inhibits IL-1-induced release of Interleukin-8 by MRC-5 cells (ATCC Accession No. CCL-171) in an in vitro assay with a ND50 that is ≦1 nM.

55. The method of claim 51, wherein said polypeptide domain that has binding specificity for IL-1R1 inhibits IL-1-induced release of Interleukin-6 in a whole blood assay with a ND50 that is ≦1 μM.

56. The method of claim 51, wherein said polypeptide domain that has binding specificity for IL-1R1 is an antigen-binding fragment of an antibody, and said antigen-binding fragment is an immunoglobulin single variable domain.

57. The method of claim 56, wherein one or more of the framework regions (FR) in said immunoglobulin single variable domain comprise (a) the amino acid sequence of a human framework region, (b) at least 8 contiguous amino acids of the amino acid sequence of a human framework region, or (c) an amino acid sequence encoded by a human germline antibody gene segment, wherein said framework regions are as defined by Kabat.

58. The method of claim 56, wherein the amino acid sequences of one or more framework regions in said immunoglobulin single variable domain are the same as the amino acid sequence of a corresponding framework region encoded by a human germline antibody gene segment, or the amino acid sequences of one or more of said framework regions collectively comprise up to 5 amino acid differences relative to the corresponding framework regions encoded by a human germline antibody gene segment.

59. The method of claim 56, wherein the amino acid sequences of FR1, FR2, FR3 and FR4 in said immunoglobulin single variable domain are the same as the amino acid sequences of corresponding framework regions encoded by a human germline antibody gene segment, or the amino acid sequences of FR1, FR2, FR3 and FR4 collectively contain up to 10 amino acid differences relative to the corresponding framework regions encoded by a human germline antibody gene segment.

60. The method of claim 56, wherein the immunoglobulin single variable domain comprises FR1, FR2 and FR3 regions, and the amino acid sequence of said FR1, FR2 and FR3 are the same as the amino acid sequences of corresponding framework regions encoded by a human germline antibody gene segment.

61. The method of any one of claims 57-60, wherein said human germline antibody gene segment comprises is DPK9 and JK1.

62. The method of claim 56, wherein said immunoglobulin single variable domain competes for binding to IL-1R1 with an immunoglobulin single variable domain selected from the group consisting of DOM4-122-23 (SEQ ID NO:1), DOM4-122-24 (SEQ ID NO:2), DOM4-130-30 (SEQ ID NO:3), DOM4-130-46 (SEQ ID NO:4), DOM4-130-51 (SEQ ID NO:5), DOM4-130-53 (SEQ ID NO:6), DOM4-130-54 (SEQ ID NO:7), DOM4-1 (SEQ ID NO:8), DOM4-2 (SEQ ID NO:9), DOM4-3 (SEQ ID NO:10), DOM4-4 (SEQ ID NO:11), DOM4-5 (SEQ ID NO:12), DOM4-6 (SEQ ID NO:13), DOM4-7 (SEQ ID NO:14), DOM4-8 (SEQ ID NO:15), DOM4-9 (SEQ ID NO:16), DOM4-10 (SEQ ID NO:17), DOM4-11 (SEQ ID NO:18), DOM4-12 (SEQ ID NO:19), DOM4-13 (SEQ ID NO:20), DOM4-14 (SEQ ID NO:21), DOM4-15 (SEQ ID NO:22), DOM4-20 (SEQ ID NO:23), DOM4-21 (SEQ ID NO:24), DOM4-22 (SEQ ID NO:25), DOM4-23 (SEQ ID NO:26), DOM4-25 (SEQ ID NO:27), DOM4-26 (SEQ ID NO:28), DOM4-27 (SEQ ID NO:29), DOM4-28 (SEQ ID NO:30), DOM4-29 (SEQ ID NO:31), DOM4-31 (SEQ ID NO:32), DOM4-32 (SEQ ID NO:33), DOM4-33 (SEQ ID NO:34), DOM4-34 (SEQ ID NO:35), DOM4-36 (SEQ ID NO:36), DOM4-37 (SEQ ID NO:37), DOM4-38 (SEQ ID NO:38), DOM4-39 (SEQ ID NO:39), DOM4-40 (SEQ ID NO:40), DOM4-41 (SEQ ID NO:41), DOM4-42 (SEQ ID NO:42), DOM4-44 (SEQ ID NO:43), DOM4-45 (SEQ ID NO:44), DOM4-46 (SEQ ID NO:45), DOM4-49 (SEQ ID NO:46), DOM4-50 (SEQ ID NO:47), DOM4-74 (SEQ ID NO:48), DOM4-75 (SEQ ID NO:49), DOM4-76 (SEQ ID NO:50), DOM4-78 (SEQ ID NO:51), DOM4-79 (SEQ ID NO:52), DOM4-80 (SEQ ID NO:53), DOM4-81 (SEQ ID NO:54), DOM4-82 (SEQ ID NO:55), DOM4-83 (SEQ ID NO:56), DOM4-84 (SEQ ID NO:57), DOM4-85 (SEQ ID NO:58), DOM4-86 (SEQ ID NO:59), DOM4-87 (SEQ ID NO:60), DOM4-88 (SEQ ID NO:61), DOM4-89 (SEQ ID NO:62), DOM4-90 (SEQ ID NO:63), DOM4-91 (SEQ ID NO:64), DOM4-92 (SEQ ID NO:65), DOM4-93 (SEQ ID NO:66), DOM4-94 (SEQ ID NO:67), DOM4-95 (SEQ ID NO:68), DOM4-96 (SEQ ID NO:69), DOM4-97 (SEQ ID NO:70), DOM4-98 (SEQ ID NO:71), DOM4-99 (SEQ ID NO:72), DOM4-100 (SEQ ID NO:73), DOM4-101 (SEQ ID NO:74), DOM4-102 (SEQ ID NO:75), DOM4-103 (SEQ ID NO:76), DOM4-104 (SEQ ID NO:77), DOM4-105 (SEQ ID NO:78), DOM4-106 (SEQ ID NO:79), DOM4-107 (SEQ ID NO:80), DOM4-108 (SEQ ID NO:81), DOM4-109 (SEQ ID NO:82), DOM4-110 (SEQ ID NO:83), DOM4-111 (SEQ ID NO:84), DOM4-112 (SEQ ID NO:85), DOM4-113 (SEQ ID NO:86), DOM4-114 (SEQ ID NO:87), DOM4-115 (SEQ ID NO:88), DOM4-116 (SEQ ID NO:89), DOM4-117 (SEQ ID NO:90), DOM4-118 (SEQ ID NO:91), DOM4-119 (SEQ ID NO:92), DOM4-120 (SEQ ID NO:93), DOM4-121 (SEQ ID NO:94), DOM4-122 (SEQ ID NO:95), DOM4-122-1 (SEQ ID NO:96), DOM4-122-2 (SEQ ID NO:97), DOM4-122-3 (SEQ ID NO:98), DOM4-122-4 (SEQ ID NO:99), DOM4-122-5 (SEQ ID NO:100), DOM4-122-6 (SEQ ID NO:101), DOM4-122-7 (SEQ ID NO:102), DOM4-122-8 (SEQ ID NO:103), DOM4-122-9 (SEQ ID NO:104), DOM4-122-10 (SEQ ID NO:105), DOM4-122-11 (SEQ ID NO:106), DOM4-122-12 (SEQ ID NO:107), DOM4-122-13 (SEQ ID NO:108), DOM4-122-14 (SEQ ID NO:109), DOM4-122-15 (SEQ ID NO:110), DOM4-122-16 (SEQ ID NO:111), DOM4-122-17 (SEQ ID NO:112), DOM4-122-18 (SEQ ID NO:113), DOM4-122-19 (SEQ ID NO:114), DOM4-122-20 (SEQ ID NO:115), DOM4-122-21 (SEQ ID NO:116), DOM4-122-22 (SEQ ID NO:117), DOM4-122-25 (SEQ ID NO:118), DOM4-122-26 (SEQ ID NO:119), DOM4-122-27 (SEQ ID NO:120), DOM4-122-28 (SEQ ID NO:121), DOM4-122-29 (SEQ ID NO:122), DOM4-122-30 (SEQ ID NO:123), DOM4-122-31 (SEQ ID NO:124), DOM4-122-32 (SEQ ID NO:125), DOM4-122-33 (SEQ ID NO:126), DOM4-122-34 (SEQ ID NO:127), DOM4-122-35 (SEQ ID NO:128), DOM4-122-36 (SEQ ID NO:129), DOM4-122-37 (SEQ ID NO:130), DOM4-122-38 (SEQ ID NO:131), DOM4-122-39 (SEQ ID NO:132), DOM4-122-40 (SEQ ID NO:133), DOM4-122-41 (SEQ ID NO:134), DOM4-122-42 (SEQ ID NO:135), DOM4-122-43 (SEQ ID NO:136), DOM4-122-44 (SEQ ID NO:137), DOM4-122-45 (SEQ ID NO:138), DOM4-122-46 (SEQ ID NO:139), DOM4-122-47 (SEQ ID NO:140), DOM4-122-48 (SEQ ID NO:141), DOM4-122-49 (SEQ ID NO:142), DOM4-122-50 (SEQ ID NO:143), DOM4-122-51 (SEQ ID NO:144), DOM4-122-52 (SEQ ID NO:145), DOM4-122-54 (SEQ ID NO:146), DOM4-122-55 (SEQ ID NO:147), DOM4-122-56 (SEQ ID NO:148), DOM4-122-57 (SEQ ID NO:149), DOM4-122-58 (SEQ ID NO:150), DOM4-122-59 (SEQ ID NO:151), DOM4-122-60 (SEQ ID NO:152), DOM4-122-61 (SEQ ID NO:153), DOM4-122-62 (SEQ ID NO:154), DOM4-122-63 (SEQ ID NO:155), DOM4-122-64 (SEQ ID NO:156), DOM4-122-65 (SEQ ID NO:157), DOM4-122-66 (SEQ ID NO:158), DOM4-122-67 (SEQ ID NO:159), DOM4-122-68 (SEQ ID NO:160), DOM4-122-69 (SEQ ID NO:161), DOM4-122-70 (SEQ ID NO:162), DOM4-122-71 (SEQ ID NO:163), DOM4-122-72 (SEQ ID NO:164), DOM4-122-73 (SEQ ID NO:165), DOM4-123 (SEQ ID NO:166), DOM4-124 (SEQ ID NO:167) DOM4-125 (SEQ ID NO:168), DOM4-126 (SEQ ID NO:169), DOM4-127 (SEQ ID NO:170), DOM4-128 (SEQ ID NO:171), DOM4-129 (SEQ ID NO:172), DOM4-129-1 (SEQ ID NO:173), DOM4-129-2 (SEQ ID NO:174), DOM4-129-3 (SEQ ID NO:175), DOM4-129-4 (SEQ ID NO:176), DOM4-129-5 (SEQ ID NO:177), DOM4-129-6 (SEQ ID NO:178), DOM4-129-7 (SEQ ID NO:179), DOM4-129-8 (SEQ ID NO:180), DOM4-129-9 (SEQ ID NO:181), DOM4-129-10 (SEQ ID NO:182), DOM4-129-11 (SEQ ID NO:183), DOM4-129-12 (SEQ ID NO:184), DOM4-129-13 (SEQ ID NO:185), DOM4-129-14 (SEQ ID NO:186), DOM4-129-15 (SEQ ID NO:187), DOM4-129-16 (SEQ ID NO:188), DOM4-129-17 (SEQ ID NO:189), DOM4-129-18 (SEQ ID NO:190), DOM4-129-19 (SEQ ID NO:191), DOM4-129-20 (SEQ ID NO:192), DOM4-129-21 (SEQ ID NO:193), DOM4-129-22 (SEQ ID NO:194), DOM4-129-23 (SEQ ID NO:195), DOM4-129-24 (SEQ ID NO:196), DOM4-129-25 (SEQ ID NO:197), DOM4-129-26 (SEQ ID NO:198), DOM4-129-27 (SEQ ID NO:199), DOM4-129-28 (SEQ ID NO:200), DOM4-129-29 (SEQ ID NO:201), DOM4-129-31 (SEQ ID NO:202), DOM4-129-32 (SEQ ID NO:203), DOM4-129-33 (SEQ ID NO:204), DOM4-129-34 (SEQ ID NO:205), DOM4-129-35 (SEQ ID NO:206), DOM4-129-37 (SEQ ID NO:207), DOM4-129-38 (SEQ ID NO:208), DOM4-129-39 (SEQ ID NO:209), DOM4-129-40 (SEQ ID NO:210), DOM4-129-41 (SEQ ID NO:211), DOM4-129-42 (SEQ ID NO:212), DOM4-129-43 (SEQ ID NO:213), DOM4-129-44 (SEQ ID NO:214), DOM4-130 (SEQ ID NO:215), DOM4-130-1 (SEQ ID NO:216), DOM4-130-2 (SEQ ID NO:217), DOM4-130-3 (SEQ ID NO:218), DOM4-130-4 (SEQ ID NO:219), DOM4-130-5 (SEQ ID NO:220), DOM4-130-6 (SEQ ID NO:221), DOM4-130-7 (SEQ ID NO:222), DOM4-130-8 (SEQ ID NO:223), DOM4-130-9 (SEQ ID NO:224), DOM4-130-10 (SEQ ID NO:225), DOM4-130-11 (SEQ ID NO:226), DOM4-130-12 (SEQ ID NO:227), DOM4-130-13 (SEQ ID NO:228), DOM4-130-14 (SEQ ID NO:229), DOM4-130-15 (SEQ ID NO:230), DOM4-130-16 (SEQ ID NO:231), DOM4-130-17 (SEQ ID NO:232), DOM4-130-18 (SEQ ID NO:233), DOM4-130-19 (SEQ ID NO:234), DOM4-130-20 (SEQ ID NO:235), DOM4-130-21 (SEQ ID NO:236), DOM4-130-22 (SEQ ID NO:237), DOM4-130-23 (SEQ ID NO:238), DOM4-130-24 (SEQ ID NO:239), DOM4-130-25 (SEQ ID NO:240), DOM4-130-26 (SEQ ID NO:241), DOM4-130-27 (SEQ ID NO:242), DOM4-130-28 (SEQ ID NO:243), DOM4-130-31 (SEQ ID NO:244), DOM4-130-32 (SEQ ID NO:245), DOM4-130-33 (SEQ ID NO:246), DOM4-130-34 (SEQ ID NO:247), DOM4-130-35 (SEQ ID NO:248), DOM4-130-36 (SEQ ID NO:249), DOM4-130-37 (SEQ ID NO:250), DOM4-130-38 (SEQ ID NO:251), DOM4-130-39 (SEQ ID NO:252), DOM4-130-40 (SEQ ID NO:253), DOM4-130-41 (SEQ ID NO:254), DOM4-130-42 (SEQ ID NO:255), DOM4-130-43 (SEQ ID NO:256), DOM4-130-44 (SEQ ID NO:257), DOM4-130-45 (SEQ ID NO:258), DOM4-130-46 (SEQ ID NO:259), DOM4-130-47 (SEQ ID NO:260), DOM4-130-48 (SEQ ID NO:261), DOM4-130-49 (SEQ ID NO:262), DOM4-130-50 (SEQ ID NO:263), DOM4-130-51 (SEQ ID NO:264), DOM4-130-52 (SEQ ID NO:265), DOM4-130-53 (SEQ ID NO:266), DOM4-130-54 (SEQ ID NO:267), DOM4-130-55 (SEQ ID NO:268), DOM4-130-56 (SEQ ID NO:269), DOM4-130-57 (SEQ ID NO:270), DOM4-130-58 (SEQ ID NO:271), DOM4-130-59 (SEQ ID NO:272), DOM4-130-60 (SEQ ID NO:273), DOM4-130-61 (SEQ ID NO:274), DOM4-130-62 (SEQ ID NO:275), DOM4-130-63 (SEQ ID NO:276), DOM4-130-64 (SEQ ID NO:277), DOM4-130-65 (SEQ ID NO:278), DOM4-130-66 (SEQ ID NO:279), DOM4-130-67 (SEQ ID NO:280), DOM4-130-68 (SEQ ID NO:281), DOM4-130-69 (SEQ ID NO:282), DOM4-130-70 (SEQ ID NO:283), DOM4-130-71 (SEQ ID NO:284), DOM4-130-72 (SEQ ID NO:285), DOM4-130-73 (SEQ ID NO:286), DOM4-130-74 (SEQ ID NO:287), DOM4-130-75 (SEQ ID NO:288), DOM4-130-76 (SEQ ID NO:289), DOM4-130-77 (SEQ ID NO:290), DOM4-130-78 (SEQ ID NO:291), DOM4-130-79 (SEQ ID NO:292), DOM4-130-80 (SEQ ID NO:293), DOM4-130-81 (SEQ ID NO:294), DOM4-130-82 (SEQ ID NO:295), DOM4-130-83 (SEQ ID NO:296), DOM4-130-84 (SEQ ID NO:297), DOM4-130-85 (SEQ ID NO:298), DOM4-130-86 (SEQ ID NO:299), DOM4-130-87 (SEQ ID NO:300), DOM4-130-88 (SEQ ID NO:301), DOM4-130-89 (SEQ ID NO:302), DOM4-130-90 (SEQ ID NO:303), DOM4-130-91 (SEQ ID NO:304), DOM4-130-92 (SEQ ID NO:305), DOM4-130-93 (SEQ ID NO:306), DOM4-130-94 (SEQ ID NO:307), DOM4-130-95 (SEQ ID NO:308), DOM4-130-96 (SEQ ID NO:309), DOM4-130-97 (SEQ ID NO:310), DOM4-130-98 (SEQ ID NO:311), DOM4-130-99 (SEQ ID NO:312), DOM4-130-100 (SEQ ID NO:313), DOM4-130-101 (SEQ ID NO:314), DOM4-130-102 (SEQ ID NO:315), DOM4-130-103 (SEQ ID NO:316), DOM4-130-104 (SEQ ID NO:317), DOM4-130-105 (SEQ ID NO:318), DOM4-130-106 (SEQ ID NO:319), DOM4-130-107 (SEQ ID NO:320), DOM4-130-108 (SEQ ID NO:321), DOM4-130-109 (SEQ ID NO:322), DOM4-130-110 (SEQ ID NO:323), DOM4-130-111 (SEQ ID NO:324), DOM4-130-112 (SEQ ID NO:325), DOM4-130-113 (SEQ ID NO:326), DOM4-130-114 (SEQ ID NO:327), DOM4-130-115 (SEQ ID NO:328), DOM4-130-116 (SEQ ID NO:329), DOM4-130-117 (SEQ ID NO:330), DOM4-130-118 (SEQ ID NO:331), DOM4-130-119 (SEQ ID NO:332), DOM4-130-120 (SEQ ID NO:333), DOM4-130-121 (SEQ ID NO:334), DOM4-130-122 (SEQ ID NO:335), DOM4-130-123 (SEQ ID NO:336), DOM4-130-124 (SEQ ID NO:337), DOM4-130-125 (SEQ ID NO:338), DOM4-130-126 (SEQ ID NO:339), DOM4-130-127 (SEQ ID NO:340), DOM4-130-128 (SEQ ID NO:341), DOM4-130-129 (SEQ ID NO:342), DOM4-130-130 (SEQ ID NO:343), DOM4-130-131 (SEQ ID NO:344), DOM4-130-132 (SEQ ID NO:345), DOM4-130-133 (SEQ ID NO:346), DOM4-131 (SEQ ID NO:347), DOM4-132 (SEQ ID NO:348), and DOM4-133 (SEQ ID NO:349).

63. The method of claim 56, wherein said immunoglobulin single variable domain comprises an amino acid sequence that has at least about 90% amino acid sequence identity with an amino acid sequence selected from the group consisting of DOM4-122-23 (SEQ ID NO:1), DOM4-122-24 (SEQ ID NO:2), DOM4-130-30 (SEQ ID NO:3), DOM4-130-46 (SEQ ID NO:4), DOM4-130-51 (SEQ ID NO:5), DOM4-130-53 (SEQ ID NO:6), DOM4-130-54 (SEQ ID NO:7), DOM4-1 (SEQ ID NO:8), DOM4-2 (SEQ ID NO:9), DOM4-3 (SEQ ID NO:10), DOM4-4 (SEQ ID NO:11), DOM4-5 (SEQ ID NO:12), DOM4-6 (SEQ ID NO:13), DOM4-7 (SEQ ID NO:14), DOM4-8 (SEQ ID NO:15), DOM4-9 (SEQ ID NO:16), DOM4-10 (SEQ ID NO:17), DOM4-11 (SEQ ID NO:18), DOM4-12 (SEQ ID NO:19), DOM4-13 (SEQ ID NO:20), DOM4-14 (SEQ ID NO:21), DOM4-15 (SEQ ID NO:22), DOM4-20 (SEQ ID NO:23), DOM4-21 (SEQ ID NO:24), DOM4-22 (SEQ ID NO:25), DOM4-23 (SEQ ID NO:26), DOM4-25 (SEQ ID NO:27), DOM4-26 (SEQ ID NO:28), DOM4-27 (SEQ ID NO:29), DOM4-28 (SEQ ID NO:30), DOM4-29 (SEQ ID NO:31), DOM4-31 (SEQ ID NO:32), DOM4-32 (SEQ ID NO:33), DOM4-33 (SEQ ID NO:34), DOM4-34 (SEQ ID NO:35), DOM4-36 (SEQ ID NO:36), DOM4-37 (SEQ ID NO:37), DOM4-38 (SEQ ID NO:38), DOM4-39 (SEQ ID NO:39), DOM4-40 (SEQ ID NO:40), DOM4-41 (SEQ ID NO:41), DOM4-42 (SEQ ID NO:42), DOM4-44 (SEQ ID NO:43), DOM4-45 (SEQ ID NO:44), DOM4-46 (SEQ ID NO:45), DOM4-49 (SEQ ID NO:46), DOM4-50 (SEQ ID NO:47), DOM4-74 (SEQ ID NO:48), DOM4-75 (SEQ ID NO:49), DOM4-76 (SEQ ID NO:50), DOM4-78 (SEQ ID NO:51), DOM4-79 (SEQ ID NO:52), DOM4-80 (SEQ ID NO:53), DOM4-81 (SEQ ID NO:54), DOM4-82 (SEQ ID NO:55), DOM4-83 (SEQ ID NO:56), DOM4-84 (SEQ ID NO:57), DOM4-85 (SEQ ID NO:58), DOM4-86 (SEQ ID NO:59), DOM4-87 (SEQ ID NO:60), DOM4-88 (SEQ ID NO:61), DOM4-89 (SEQ ID NO:62), DOM4-90 (SEQ ID NO:63), DOM4-91 (SEQ ID NO:64), DOM4-92 (SEQ ID NO:65), DOM4-93 (SEQ ID NO:66), DOM4-94 (SEQ ID NO:67), DOM4-95 (SEQ ID NO:68), DOM4-96 (SEQ ID NO:69), DOM4-97 (SEQ ID NO:70), DOM4-98 (SEQ ID NO:71), DOM4-99 (SEQ ID NO:72), DOM4-100 (SEQ ID NO:73), DOM4-101 (SEQ ID NO:74), DOM4-102 (SEQ ID NO:75), DOM4-103 (SEQ ID NO:76), DOM4-104 (SEQ ID NO:77), DOM4-105 (SEQ ID NO:78), DOM4-106 (SEQ ID NO:79), DOM4-107 (SEQ ID NO:80), DOM4-108 (SEQ ID NO:81), DOM4-109 (SEQ ID NO:82), DOM4-110 (SEQ ID NO:83), DOM4-111 (SEQ ID NO:84), DOM4-112 (SEQ ID NO:85), DOM4-113 (SEQ ID NO:86), DOM4-114 (SEQ ID NO:87), DOM4-115 (SEQ ID NO:88), DOM4-116 (SEQ ID NO:89), DOM4-117 (SEQ ID NO:90), DOM4-118 (SEQ ID NO:91), DOM4-119 (SEQ ID NO:92), DOM4-120 (SEQ ID NO:93), DOM4-121 (SEQ ID NO:94), DOM4-122 (SEQ ID NO:95), DOM4-122-1 (SEQ ID NO:96), DOM4-122-2 (SEQ ID NO:97), DOM4-122-3 (SEQ ID NO:98), DOM4-122-4 (SEQ ID NO:99), DOM4-122-5 (SEQ ID NO:100), DOM4-122-6 (SEQ ID NO:101), DOM4-122-7 (SEQ ID NO:102), DOM4-122-8 (SEQ ID NO:103), DOM4-122-9 (SEQ ID NO:104), DOM4-122-10 (SEQ ID NO:105), DOM4-122-11 (SEQ ID NO:106), DOM4-122-12 (SEQ ID NO:107), DOM4-122-13 (SEQ ID NO:108), DOM4-122-14 (SEQ ID NO:109), DOM4-122-15 (SEQ ID NO:110), DOM4-122-16 (SEQ ID NO:111), DOM4-122-17 (SEQ ID NO:112), DOM4-122-18 (SEQ ID NO:113), DOM4-122-19 (SEQ ID NO:114), DOM4-122-20 (SEQ ID NO:115), DOM4-122-21 (SEQ ID NO:116), DOM4-122-22 (SEQ ID NO:117), DOM4-122-25 (SEQ ID NO:118), DOM4-122-26 (SEQ ID NO:119), DOM4-122-27 (SEQ ID NO:120), DOM4-122-28 (SEQ ID NO:121), DOM4-122-29 (SEQ ID NO:122), DOM4-122-30 (SEQ ID NO:123), DOM4-122-31 (SEQ ID NO:124), DOM4-122-32 (SEQ ID NO:125), DOM4-122-33 (SEQ ID NO:126), DOM4-122-34 (SEQ ID NO:127), DOM4-122-35 (SEQ ID NO:128), DOM4-122-36 (SEQ ID NO:129), DOM4-122-37 (SEQ ID NO:130), DOM4-122-38 (SEQ ID NO:131), DOM4-122-39 (SEQ ID NO:132), DOM4-122-40 (SEQ ID NO:133), DOM4-122-41 (SEQ ID NO:134), DOM4-122-42 (SEQ ID NO:135), DOM4-122-43 (SEQ ID NO:136), DOM4-122-44 (SEQ ID NO:137), DOM4-122-45 (SEQ ID NO:138), DOM4-122-46 (SEQ ID NO:139), DOM4-122-47 (SEQ ID NO:140), DOM4-122-48 (SEQ ID NO:141), DOM4-122-49 (SEQ ID NO:142), DOM4-122-50 (SEQ ID NO:143), DOM4-122-51 (SEQ ID NO:144), DOM4-122-52 (SEQ ID NO:145), DOM4-122-54 (SEQ ID NO:146), DOM4-122-55 (SEQ ID NO:147), DOM4-122-56 (SEQ ID NO:148), DOM4-122-57 (SEQ ID NO:149), DOM4-122-58 (SEQ ID NO:150), DOM4-122-59 (SEQ ID NO:151), DOM4-122-60 (SEQ ID NO:152), DOM4-122-61 (SEQ ID NO:153), DOM4-122-62 (SEQ ID NO:154), DOM4-122-63 (SEQ ID NO:155), DOM4-122-64 (SEQ ID NO:156), DOM4-122-65 (SEQ ID NO:157), DOM4-122-66 (SEQ ID NO:158), DOM4-122-67 (SEQ ID NO:159), DOM4-122-68 (SEQ ID NO:160), DOM4-122-69 (SEQ ID NO:161), DOM4-122-70 (SEQ ID NO:162), DOM4-122-71 (SEQ ID NO:163), DOM4-122-72 (SEQ ID NO:164), DOM4-122-73 (SEQ ID NO:165), DOM4-123 (SEQ ID NO:166), DOM4-124 (SEQ ID NO:167) DOM4-125 (SEQ ID NO:168), DOM4-126 (SEQ ID NO:169), DOM4-127 (SEQ ID NO:170), DOM4-128 (SEQ ID NO:171), DOM4-129 (SEQ ID NO:172), DOM4-129-1 (SEQ ID NO:173), DOM4-129-2 (SEQ ID NO:174), DOM4-129-3 (SEQ ID NO:175), DOM4-129-4 (SEQ ID NO:176), DOM4-129-5 (SEQ ID NO:177), DOM4-129-6 (SEQ ID NO:178), DOM4-129-7 (SEQ ID NO:179), DOM4-129-8 (SEQ ID NO:180), DOM4-129-9 (SEQ ID NO:181), DOM4-129-10 (SEQ ID NO:182), DOM4-129-11 (SEQ ID NO:183), DOM4-129-12 (SEQ ID NO:184), DOM4-129-13 (SEQ ID NO:185), DOM4-129-14 (SEQ ID NO:186), DOM4-129-15 (SEQ ID NO:187), DOM4-129-16 (SEQ ID NO:188), DOM4-129-17 (SEQ ID NO:189), DOM4-129-18 (SEQ ID NO:190), DOM4-129-19 (SEQ ID NO:191), DOM4-129-20 (SEQ ID NO:192), DOM4-129-21 (SEQ ID NO:193), DOM4-129-22 (SEQ ID NO:194), DOM4-129-23 (SEQ ID NO:195), DOM4-129-24 (SEQ ID NO:196), DOM4-129-25 (SEQ ID NO:197), DOM4-129-26 (SEQ ID NO:198), DOM4-129-27 (SEQ ID NO:199), DOM4-129-28 (SEQ ID NO:200), DOM4-129-29 (SEQ ID NO:201), DOM4-129-31 (SEQ ID NO:202), DOM4-129-32 (SEQ ID NO:203), DOM4-129-33 (SEQ ID NO:204), DOM4-129-34 (SEQ ID NO:205), DOM4-129-35 (SEQ ID NO:206), DOM4-129-37 (SEQ ID NO:207), DOM4-129-38 (SEQ ID NO:208), DOM4-129-39 (SEQ ID NO:209), DOM4-129-40 (SEQ ID NO:210), DOM4-129-41 (SEQ ID NO:211), DOM4-129-42 (SEQ ID NO:212), DOM4-129-43 (SEQ ID NO:213), DOM4-129-44 (SEQ ID NO:214), DOM4-130 (SEQ ID NO:215), DOM4-130-1 (SEQ ID NO:216), DOM4-130-2 (SEQ ID NO:217), DOM4-130-3 (SEQ ID NO:218), DOM4-130-4 (SEQ ID NO:219), DOM4-130-5 (SEQ ID NO:220), DOM4-130-6 (SEQ ID NO:221), DOM4-130-7 (SEQ ID NO:222), DOM4-130-8 (SEQ ID NO:223), DOM4-130-9 (SEQ ID NO:224), DOM4-130-10 (SEQ ID NO:225), DOM4-130-11 (SEQ ID NO:226), DOM4-130-12 (SEQ ID NO:227), DOM4-130-13 (SEQ ID NO:228), DOM4-130-14 (SEQ ID NO:229), DOM4-130-15 (SEQ ID NO:230), DOM4-130-16 (SEQ ID NO:231), DOM4-130-17 (SEQ ID NO:232), DOM4-130-18 (SEQ ID NO:233), DOM4-130-19 (SEQ ID NO:234), DOM4-130-20 (SEQ ID NO:235), DOM4-130-21 (SEQ ID NO:236), DOM4-130-22 (SEQ ID NO:237), DOM4-130-23 (SEQ ID NO:238), DOM4-130-24 (SEQ ID NO:239), DOM4-130-25 (SEQ ID NO:240), DOM4-130-26 (SEQ ID NO:241), DOM4-130-27 (SEQ ID NO:242), DOM4-130-28 (SEQ ID NO:243), DOM4-130-31 (SEQ ID NO:244), DOM4-130-32 (SEQ ID NO:245), DOM4-130-33 (SEQ ID NO:246), DOM4-130-34 (SEQ ID NO:247), DOM4-130-35 (SEQ ID NO:248), DOM4-130-36 (SEQ ID NO:249), DOM4-130-37 (SEQ ID NO:250), DOM4-130-38 (SEQ ID NO:251), DOM4-130-39 (SEQ ID NO:252), DOM4-130-40 (SEQ ID NO:253), DOM4-130-41 (SEQ ID NO:254), DOM4-130-42 (SEQ ID NO:255), DOM4-130-43 (SEQ ID NO:256), DOM4-130-44 (SEQ ID NO:257), DOM4-130-45 (SEQ ID NO:258), DOM4-130-46 (SEQ ID NO:259), DOM4-130-47 (SEQ ID NO:260), DOM4-130-48 (SEQ ID NO:261), DOM4-130-49 (SEQ ID NO:262), DOM4-130-50 (SEQ ID NO:263), DOM4-130-51 (SEQ ID NO:264), DOM4-130-52 (SEQ ID NO:265), DOM4-130-53 (SEQ ID NO:266), DOM4-130-54 (SEQ ID NO:267), DOM4-130-55 (SEQ ID NO:268), DOM4-130-56 (SEQ ID NO:269), DOM4-130-57 (SEQ ID NO:270), DOM4-130-58 (SEQ ID NO:271), DOM4-130-59 (SEQ ID NO:272), DOM4-130-60 (SEQ ID NO:273), DOM4-130-61 (SEQ ID NO:274), DOM4-130-62 (SEQ ID NO:275), DOM4-130-63 (SEQ ID NO:276), DOM4-130-64 (SEQ ID NO:277), DOM4-130-65 (SEQ ID NO:278), DOM4-130-66 (SEQ ID NO:279), DOM4-130-67 (SEQ ID NO:280), DOM4-130-68 (SEQ ID NO:281), DOM4-130-69 (SEQ ID NO:282), DOM4-130-70 (SEQ ID NO:283), DOM4-130-71 (SEQ ID NO:284), DOM4-130-72 (SEQ ID NO:285), DOM4-130-73 (SEQ ID NO:286), DOM4-130-74 (SEQ ID NO:287), DOM4-130-75 (SEQ ID NO:288), DOM4-130-76 (SEQ ID NO:289), DOM4-130-77 (SEQ ID NO:290), DOM4-130-78 (SEQ ID NO:291), DOM4-130-79 (SEQ ID NO:292), DOM4-130-80 (SEQ ID NO:293), DOM4-130-81 (SEQ ID NO:294), DOM4-130-82 (SEQ ID NO:295), DOM4-130-83 (SEQ ID NO:296), DOM4-130-84 (SEQ ID NO:297), DOM4-130-85 (SEQ ID NO:298), DOM4-130-86 (SEQ ID NO:299), DOM4-130-87 (SEQ ID NO:300), DOM4-130-88 (SEQ ID NO:301), DOM4-130-89 (SEQ ID NO:302), DOM4-130-90 (SEQ ID NO:303), DOM4-130-91 (SEQ ID NO:304), DOM4-130-92 (SEQ ID NO:305), DOM4-130-93 (SEQ ID NO:306), DOM4-130-94 (SEQ ID NO:307), DOM4-130-95 (SEQ ID NO:308), DOM4-130-96 (SEQ ID NO:309), DOM4-130-97 (SEQ ID NO:310), DOM4-130-98 (SEQ ID NO:311), DOM4-130-99 (SEQ ID NO:312), DOM4-130-100 (SEQ ID NO:313), DOM4-130-101 (SEQ ID NO:314), DOM4-130-102 (SEQ ID NO:315), DOM4-130-103 (SEQ ID NO:316), DOM4-130-104 (SEQ ID NO:317), DOM4-130-105 (SEQ ID NO:318), DOM4-130-106 (SEQ ID NO:319), DOM4-130-107 (SEQ ID NO:320), DOM4-130-108 (SEQ ID NO:321), DOM4-130-109 (SEQ ID NO:322), DOM4-130-110 (SEQ ID NO:323), DOM4-130-111 (SEQ ID NO:324), DOM4-130-112 (SEQ ID NO:325), DOM4-130-113 (SEQ ID NO:326), DOM4-130-114 (SEQ ID NO:327), DOM4-130-115 (SEQ ID NO:328), DOM4-130-116 (SEQ ID NO:329), DOM4-130-117 (SEQ ID NO:330), DOM4-130-118 (SEQ ID NO:331), DOM4-130-119 (SEQ ID NO:332), DOM4-130-120 (SEQ ID NO:333), DOM4-130-121 (SEQ ID NO:334), DOM4-130-122 (SEQ ID NO:335), DOM4-130-123 (SEQ ID NO:336), DOM4-130-124 (SEQ ID NO:337), DOM4-130-125 (SEQ ID NO:338), DOM4-130-126 (SEQ ID NO:339), DOM4-130-127 (SEQ ID NO:340), DOM4-130-128 (SEQ ID NO:341), DOM4-130-129 (SEQ ID NO:342), DOM4-130-130 (SEQ ID NO:343), DOM4-130-131 (SEQ ID NO:344), DOM4-130-132 (SEQ ID NO:345), DOM4-130-133 (SEQ ID NO:346), DOM4-131 (SEQ ID NO:347), DOM4-132 (SEQ ID NO:348), and DOM4-133 (SEQ ID NO:349).

64. The method of claim 51, wherein said polypeptide domain that has binding specificity for IL-1R1 binds human IL-1R1 with an affinity (KD) of about 300 nM to about 5 pM, as determined by surface plasmon resonance.

65. The method of claim 51, wherein said antagonist of IL-1R1 further comprises a half-life extending moiety.

66. The method of claim 65, wherein said half-life extending moiety is a polyalkylene glycol moiety, serum albumin or a fragment thereof, transferrin receptor or a transferrin-binding portion thereof, or an antibody or antibody fragment comprising a binding site for a polypeptide that enhances half-life in vivo.

67. The method of claim 66, wherein said half-life extending moiety is a polyethylene glycol moiety.

68. The method of claim 66, wherein said half-life extending moiety is an antibody or antibody fragment comprising a binding site for serum albumin or neonatal Fc receptor.

69. The method of claim 68, wherein said antibody or antibody fragment is an antibody fragment, and said antibody fragment is an immunoglobulin single variable domain.

70. The method of claim 69, wherein said immunoglobulin single variable domain competes with an immunoglobulin single variable domain selected from the group consisting of DOM7m-16 (SEQ ID NO:723), DOM7m-12 (SEQ ID NO:724), DOM7m-26 (SEQ ID NO:725), DOM7r-1 (SEQ ID NO:726), DOM7r-3 (SEQ ID NO:727), DOM7r-4 (SEQ ID NO:728), DOM7r-5 (SEQ ID NO:729), DOM7r-7 (SEQ ID NO:730), DOM7r-8 (SEQ ID NO:731), DOM7h-2 (SEQ ID NO:732), DOM7h-3 (SEQ ID NO:733), DOM7h-4 (SEQ ID NO:734), DOM7h-6 (SEQ ID NO:735), DOM7h-1 (SEQ ID NO:736), DOM7h-7 (SEQ ID NO:737), DOM7h-22 (SEQ ID NO:739), DOM7h-23 (SEQ ID NO:740), DOM7h-24 (SEQ ID NO:741), DOM7h-25 (SEQ ID NO:742), DOM7h-26 (SEQ ID NO:743), DOM7h-21 (SEQ ID NO:744), DOM7h-27 (SEQ ID NO:745), DOM7h-8 (SEQ ID NO:746), DOM7r-13 (SEQ ID NO:747), DOM7r-14 (SEQ ID NO:748), DOM7r-15 (SEQ ID NO:749), DOM7r-16 (SEQ ID NO:750), DOM7r-17 (SEQ ID NO:751), DOM7r-18 (SEQ ID NO:752), DOM7r-19 (SEQ ID NO:753), DOM7r-20 (SEQ ID NO:754), DOM7r-21 (SEQ ID NO:755), DOM7r-22 (SEQ ID NO:756), DOM7r-23 (SEQ ID NO:757), DOM7r-24 (SEQ ID NO:758), DOM7r-25 (SEQ ID NO:759), DOM7r-26 (SEQ ID NO:760), DOM7r-27 (SEQ ID NO:761), DOM7r-28 (SEQ ID NO:762), DOM7r-29 (SEQ ID NO:763), DOM7r-30 (SEQ ID NO:764), DOM7r-31 (SEQ ID NO:765), DOM7r-32 (SEQ ID NO:766), DOM7r-33 (SEQ ID NO:767), Sequence A (SEQ ID NO:768), Sequence B (SEQ ID NO:769), Sequence C (SEQ ID NO:770), Sequence D (SEQ ID NO:771), Sequence E (SEQ ID NO:772), Sequence F (SEQ ID NO:773), Sequence G (SEQ ID NO:774), Sequence H (SEQ ID NO:775), Sequence I (SEQ ID NO:776), Sequence J (SEQ ID NO:777), Sequence K (SEQ ID NO:778), Sequence L (SEQ ID NO:779), Sequence M (SEQ ID NO:780), Sequence N (SEQ ID NO:781), Sequence O (SEQ ID NO:782), Sequence P (SEQ ID NO:783), and Sequence Q (SEQ ID NO:784), for binding to human serum albumin.

71. The method of claim 69, wherein said immunoglobulin single variable domain binds human serum albumin comprises an amino acid sequence selected from the group consisting of DOM7m-16 (SEQ ID NO:723), DOM7m-12 (SEQ ID NO:724), DOM7m-26 (SEQ ID NO:725), DOM7r-1 (SEQ ID NO:726), DOM7r-3 (SEQ ID NO:727), DOM7r-4 (SEQ ID NO:728), DOM7r-5 (SEQ ID NO:729), DOM7r-7 (SEQ ID NO:730), DOM7r-8 (SEQ ID NO:731), DOM7h-2 (SEQ ID NO:732), DOM7h-3 (SEQ ID NO:733), DOM7h-4 (SEQ ID NO:734), DOM7h-6 (SEQ ID NO:735), DOM7h-1 (SEQ ID NO:736), DOM7h-7 (SEQ ID NO:737), DOM7h-22 (SEQ ID NO:739), DOM7h-23 (SEQ ID NO:740), DOM7h-24 (SEQ ID NO:741), DOM7h-25 (SEQ ID NO:742), DOM7h-26 (SEQ ID NO:743), DOM7h-21 (SEQ ID NO:744), DOM7h-27 (SEQ ID NO:745), DOM7h-8 (SEQ ID NO:746), DOM7r-13 (SEQ ID NO:747), DOM7r-14 (SEQ ID NO:748), DOM7r-15 (SEQ ID NO:749), DOM7r-16 (SEQ ID NO:750), DOM7r-17 (SEQ ID NO:751), DOM7r-18 (SEQ ID NO:752), DOM7r-19 (SEQ ID NO:753), DOM7r-20 (SEQ ID NO:754), DOM7r-21 (SEQ ID NO:755), DOM7r-22 (SEQ ID NO:756), DOM7r-23 (SEQ ID NO:757), DOM7r-24 (SEQ ID NO:758), DOM7r-25 (SEQ ID NO:759), DOM7r-26 (SEQ ID NO:760), DOM7r-27 (SEQ ID NO:761), DOM7r-28 (SEQ ID NO:762), DOM7r-29 (SEQ ID NO:763), DOM7r-30 (SEQ ID NO:764), DOM7r-31 (SEQ ID NO:765), DOM7r-32 (SEQ ID NO:766), DOM7r-33 (SEQ ID NO:767), Sequence A (SEQ ID NO:768), Sequence B (SEQ ID NO:769), Sequence C (SEQ ID NO:770), Sequence D (SEQ ID NO:771), Sequence E (SEQ ID NO:772), Sequence F (SEQ ID NO:773), Sequence G (SEQ ID NO:774), Sequence H (SEQ ID NO:775), Sequence I (SEQ ID NO:776), Sequence J (SEQ ID NO:777), Sequence K (SEQ ID NO:778), Sequence L (SEQ ID NO:779), Sequence M (SEQ ID NO:780), Sequence N (SEQ ID NO:781), Sequence O (SEQ ID NO:782), Sequence P (SEQ ID NO:783), and Sequence Q (SEQ ID NO:784).

72. The method of claim 51, wherein said antagonist of IL-1R1 further comprises a polypeptide binding domain that has binding specificity for Tumor Necrosis Factor Receptor 1 (TNFR1, p55) and inhibits binding of Tumor Necrosis Factor Alpha (TNFα) to TNFR1.

73. The method of claim 51, wherein said antagonist of IL-1R1 binds human IL-1R1 with an affinity (KD) of about 300 nM to about 5 pM, as determined by surface plasmon resonance.

74. The method of claim 51, wherein said respiratory disease is selected from the group consisting of lung inflammation, chronic obstructive pulmonary disease, asthma, pneumonia, hypersensitivity pneumonitis, pulmonary infiltrate with eosinophilia, environmental lung disease, pneumonia, bronchiectasis, cystic fibrosis, interstitial lung disease, primary pulmonary hypertension, pulmonary thromboembolism, disorders of the pleura, disorders of the mediastinum, disorders of the diaphragm, hypoventilation, hyperventilation, sleep apnea, acute respiratory distress syndrome, mesothelioma, sarcoma, graft rejection, graft versus host disease, lung cancer, allergic rhinitis, allergy, asbestosis, aspergilloma, aspergillosis, bronchiectasis, chronic bronchitis, emphysema, eosinophilic pneumonia, idiopathic pulmonary fibrosis, invasive pneumococcal disease, influenza, nontuberculous mycobacteria, pleural effusion, pneumoconiosis, pneumocytosis, pneumonia, pulmonary actinomycosis, pulmonary alveolar proteinosis, pulmonary anthrax, pulmonary edema, pulmonary embolus, pulmonary inflammation, pulmonary histiocytosis X, pulmonary hypertension, pulmonary nocardiosis, pulmonary tuberculosis, pulmonary veno-occlusive disease, rheumatoid lung disease, sarcoidosis, and Wegener's granulomatosis.

75. The method of claim 51, further comprising administering to said subject a therapeutically effective amount of an antagonist of Tumor Necrosis Factor Receptor 1 (TNFR1, p55).

76. The method of claim 51, wherein said antagonist of IL-1R1 is administered systemically.

77. The method of claim 76, wherein said antagonist of IL-1R1 is administered intraperoneally or subcutaneously.

78. The method of claim 51, wherein said antagonist of IL-1R1 is locally administered to pulmonary tissue.

79. The method of claim 78, wherein said antagonist of IL-1R1 is administered by inhalation or intranasal administration.

80. The method of claim 51, wherein the level of inflammatory cells in the lung is assessed by total cell counts in bronchoalveolar lavage, sputum or bronchial biopsy is reduced relative to pretreatment levels.

81. The method of claim 80, wherein the level of inflammatory cells in the lung is assessed by macrophage, polymorphonuclear, lymphocyte and/or eosinophil cell counts in bronchoalveolar lavage, sputum or bronchial biopsy.

82. A method for treating a respiratory disease, comprising administering to a subject in need thereof a therapeutically effective amount of an antagonist of Interleukin-1 Receptor Type 1 (IL-1R1), wherein said antagonist of IL-1R1 is a fusion protein or a conjugate comprising an antagonist of IL-1R1 moiety and a half-life extending moiety, wherein said antagonist of IL-1R1 moiety binds human IL-1R1 and inhibits binding of Interleukin-1 (IL-1) to human IL-1R1, and said half-life extending moiety is a polypeptide binding moiety that contains a binding site with binding specificity for a polypeptide that enhances serum half-life in vivo.

83. The method of claim 82, wherein said antagonist of IL-1R1 moiety is human Interleukin 1 receptor antagonist (IL-1ra) or a functional variant of human IL-1 ra.

84. The method of claim 82, wherein said antagonist of IL-1R1 moiety is an immunoglobulin single variable domain that competes for binding to IL-1R1 with a dAb selected from the group consisting of DOM4-122-23 (SEQ ID NO:1), DOM4-122-24 (SEQ ID NO:2), DOM4-130-30 (SEQ ID NO:3), DOM4-130-46 (SEQ ID NO:4), DOM4-130-51 (SEQ ID NO:5), DOM4-130-53 (SEQ ID NO:6), DOM4-130-54 (SEQ ID NO:7), DOM4-1 (SEQ ID NO:8), DOM4-2 (SEQ ID NO:9), DOM4-3 (SEQ ID NO:10), DOM4-4 (SEQ ID NO:11), DOM4-5 (SEQ ID NO:12), DOM4-6 (SEQ ID NO:13), DOM4-7 (SEQ ID NO:14), DOM4-8 (SEQ ID NO:15), DOM4-9 (SEQ ID NO:16), DOM4-10 (SEQ ID NO:17), DOM4-11 (SEQ ID NO:18), DOM4-12 (SEQ ID NO:19), DOM4-13 (SEQ ID NO:20), DOM4-14 (SEQ ID NO:21), DOM4-15 (SEQ ID NO:22), DOM4-20 (SEQ ID NO:23), DOM4-21 (SEQ ID NO:24), DOM4-22 (SEQ ID NO:25), DOM4-23 (SEQ ID NO:26), DOM4-25 (SEQ ID NO:27), DOM4-26 (SEQ ID NO:28), DOM4-27 (SEQ ID NO:29), DOM4-28 (SEQ ID NO:30), DOM4-29 (SEQ ID NO:31), DOM4-31 (SEQ ID NO:32), DOM4-32 (SEQ ID NO:33), DOM4-33 (SEQ ID NO:34), DOM4-34 (SEQ ID NO:35), DOM4-36 (SEQ ID NO:36), DOM4-37 (SEQ ID NO:37), DOM4-38 (SEQ ID NO:38), DOM4-39 (SEQ ID NO:39), DOM4-40 (SEQ ID NO:40), DOM4-41 (SEQ ID NO:41), DOM4-42 (SEQ ID NO:42), DOM4-44 (SEQ ID NO:43), DOM4-45 (SEQ ID NO:44), DOM4-46 (SEQ ID NO:45), DOM4-49 (SEQ ID NO:46), DOM4-50 (SEQ ID NO:47), DOM4-74 (SEQ ID NO:48), DOM4-75 (SEQ ID NO:49), DOM4-76 (SEQ ID NO:50), DOM4-78 (SEQ ID NO:51), DOM4-79 (SEQ ID NO:52), DOM4-80 (SEQ ID NO:53), DOM4-81 (SEQ ID NO:54), DOM4-82 (SEQ ID NO:55), DOM4-83 (SEQ ID NO:56), DOM4-84 (SEQ ID NO:57), DOM4-85 (SEQ ID NO:58), DOM4-86 (SEQ ID NO:59), DOM4-87 (SEQ ID NO:60), DOM4-88 (SEQ ID NO:61), DOM4-89 (SEQ ID NO:62), DOM4-90 (SEQ ID NO:63), DOM4-91 (SEQ ID NO:64), DOM4-92 (SEQ ID NO:65), DOM4-93 (SEQ ID NO:66), DOM4-94 (SEQ ID NO:67), DOM4-95 (SEQ ID NO:68), DOM4-96 (SEQ ID NO:69), DOM4-97 (SEQ ID NO:70), DOM4-98 (SEQ ID NO:71), DOM4-99 (SEQ ID NO:72), DOM4-100 (SEQ ID NO:73), DOM4-101 (SEQ ID NO:74), DOM4-102 (SEQ ID NO:75), DOM4-103 (SEQ ID NO:76), DOM4-104 (SEQ ID NO:77), DOM4-105 (SEQ ID NO:78), DOM4-106 (SEQ ID NO:79), DOM4-107 (SEQ ID NO:80), DOM4-108 (SEQ ID NO:81), DOM4-109 (SEQ ID NO:82), DOM4-110 (SEQ ID NO:83), DOM4-111 (SEQ ID NO:84), DOM4-112 (SEQ ID NO:85), DOM4-113 (SEQ ID NO:86), DOM4-114 (SEQ ID NO:87), DOM4-115 (SEQ ID NO:88), DOM4-116 (SEQ ID NO:89), DOM4-117 (SEQ ID NO:90), DOM4-118 (SEQ ID NO:91), DOM4-119 (SEQ ID NO:92), DOM4-120 (SEQ ID NO:93), DOM4-121 (SEQ ID NO:94), DOM4-122 (SEQ ID NO:95), DOM4-122-1 (SEQ ID NO:96), DOM4-122-2 (SEQ ID NO:97), DOM4-122-3 (SEQ ID NO:98), DOM4-122-4 (SEQ ID NO:99), DOM4-122-5 (SEQ ID NO:100), DOM4-122-6 (SEQ ID NO:101), DOM4-122-7 (SEQ ID NO:102), DOM4-122-8 (SEQ ID NO:103), DOM4-122-9 (SEQ ID NO:104), DOM4-122-10 (SEQ ID NO:105), DOM4-122-11 (SEQ ID NO:106), DOM4-122-12 (SEQ ID NO:107), DOM4-122-13 (SEQ ID NO:108), DOM4-122-14 (SEQ ID NO:109), DOM4-122-15 (SEQ ID NO:110), DOM4-122-16 (SEQ ID NO:111), DOM4-122-17 (SEQ ID NO:112), DOM4-122-18 (SEQ ID NO:113), DOM4-122-19 (SEQ ID NO:114), DOM4-122-20 (SEQ ID NO:115), DOM4-122-21 (SEQ ID NO:116), DOM4-122-22 (SEQ ID NO:117), DOM4-122-25 (SEQ ID NO:118), DOM4-122-26 (SEQ ID NO:119), DOM4-122-27 (SEQ ID NO:120), DOM4-122-28 (SEQ ID NO:121), DOM4-122-29 (SEQ ID NO:122), DOM4-122-30 (SEQ ID NO:123), DOM4-122-31 (SEQ ID NO:124), DOM4-122-32 (SEQ ID NO:125), DOM4-122-33 (SEQ ID NO:126), DOM4-122-34 (SEQ ID NO:127), DOM4-122-35 (SEQ ID NO:128), DOM4-122-36 (SEQ ID NO:129), DOM4-122-37 (SEQ ID NO:130), DOM4-122-38 (SEQ ID NO:131), DOM4-122-39 (SEQ ID NO:132), DOM4-122-40 (SEQ ID NO:133), DOM4-122-41 (SEQ ID NO:134), DOM4-122-42 (SEQ ID NO:135), DOM4-122-43 (SEQ ID NO:136), DOM4-122-44 (SEQ ID NO:137), DOM4-122-45 (SEQ ID NO:138), DOM4-122-46 (SEQ ID NO:139), DOM4-122-47 (SEQ ID NO:140), DOM4-122-48 (SEQ ID NO:141), DOM4-122-49 (SEQ ID NO:142), DOM4-122-50 (SEQ ID NO:143), DOM4-122-51 (SEQ ID NO:144), DOM4-122-52 (SEQ ID NO:145), DOM4-122-54 (SEQ ID NO:146), DOM4-122-55 (SEQ ID NO:147), DOM4-122-56 (SEQ ID NO:148), DOM4-122-57 (SEQ ID NO:149), DOM4-122-58 (SEQ ID NO:150), DOM4-122-59 (SEQ ID NO:151), DOM4-122-60 (SEQ ID NO:152), DOM4-122-61 (SEQ ID NO:153), DOM4-122-62 (SEQ ID NO:154), DOM4-122-63 (SEQ ID NO:155), DOM4-122-64 (SEQ ID NO:156), DOM4-122-65 (SEQ ID NO:157), DOM4-122-66 (SEQ ID NO:158), DOM4-122-67 (SEQ ID NO:159), DOM4-122-68 (SEQ ID NO:160), DOM4-122-69 (SEQ ID NO:161), DOM4-122-70 (SEQ ID NO:162), DOM4-122-71 (SEQ ID NO:163), DOM4-122-72 (SEQ ID NO:164), DOM4-122-73 (SEQ ID NO:165), DOM4-123 (SEQ ID NO:166), DOM4-124 (SEQ ID NO:167) DOM4-125 (SEQ ID NO:168), DOM4-126 (SEQ ID NO:169), DOM4-127 (SEQ ID NO:170), DOM4-128 (SEQ ID NO:171), DOM4-129 (SEQ ID NO:172), DOM4-129-1 (SEQ ID NO:173), DOM4-129-2 (SEQ ID NO:174), DOM4-129-3 (SEQ ID NO:175), DOM4-129-4 (SEQ ID NO:176), DOM4-129-5 (SEQ ID NO:177), DOM4-129-6 (SEQ ID NO:178), DOM4-129-7 (SEQ ID NO:179), DOM4-129-8 (SEQ ID NO:180), DOM4-129-9 (SEQ ID NO:181), DOM4-129-10 (SEQ ID NO:182), DOM4-129-11 (SEQ ID NO:183), DOM4-129-12 (SEQ ID NO:184), DOM4-129-13 (SEQ ID NO:185), DOM4-129-14 (SEQ ID NO:186), DOM4-129-15 (SEQ ID NO:187), DOM4-129-16 (SEQ ID NO:188), DOM4-129-17 (SEQ ID NO:189), DOM4-129-18 (SEQ ID NO:190), DOM4-129-19 (SEQ ID NO:191), DOM4-129-20 (SEQ ID NO:192), DOM4-129-21 (SEQ ID NO:193), DOM4-129-22 (SEQ ID NO:194), DOM4-129-23 (SEQ ID NO:195), DOM4-129-24 (SEQ ID NO:196), DOM4-129-25 (SEQ ID NO:197), DOM4-129-26 (SEQ ID NO:198), DOM4-129-27 (SEQ ID NO:199), DOM4-129-28 (SEQ ID NO:200), DOM4-129-29 (SEQ ID NO:201), DOM4-129-31 (SEQ ID NO:202), DOM4-129-32 (SEQ ID NO:203), DOM4-129-33 (SEQ ID NO:204), DOM4-129-34 (SEQ ID NO:205), DOM4-129-35 (SEQ ID NO:206), DOM4-129-37 (SEQ ID NO:207), DOM4-129-38 (SEQ ID NO:208), DOM4-129-39 (SEQ ID NO:209), DOM4-129-40 (SEQ ID NO:210), DOM4-129-41 (SEQ ID NO:211), DOM4-129-42 (SEQ ID NO:212), DOM4-129-43 (SEQ ID NO:213), DOM4-129-44 (SEQ ID NO:214), DOM4-130 (SEQ ID NO:215), DOM4-130-1 (SEQ ID NO:216), DOM4-130-2 (SEQ ID NO:217), DOM4-130-3 (SEQ ID NO:218), DOM4-130-4 (SEQ ID NO:219), DOM4-130-5 (SEQ ID NO:220), DOM4-130-6 (SEQ ID NO:221), DOM4-130-7 (SEQ ID NO:222), DOM4-130-8 (SEQ ID NO:223), DOM4-130-9 (SEQ ID NO:224), DOM4-130-10 (SEQ ID NO:225), DOM4-130-11 (SEQ ID NO:226), DOM4-130-12 (SEQ ID NO:227), DOM4-130-13 (SEQ ID NO:228), DOM4-130-14 (SEQ ID NO:229), DOM4-130-15 (SEQ ID NO:230), DOM4-130-16 (SEQ ID NO:231), DOM4-130-17 (SEQ ID NO:232), DOM4-130-18 (SEQ ID NO:233), DOM4-130-19 (SEQ ID NO:234), DOM4-130-20 (SEQ ID NO:235), DOM4-130-21 (SEQ ID NO:236), DOM4-130-22 (SEQ ID NO:237), DOM4-130-23 (SEQ ID NO:238), DOM4-130-24 (SEQ ID NO:239), DOM4-130-25 (SEQ ID NO:240), DOM4-130-26 (SEQ ID NO:241), DOM4-130-27 (SEQ ID NO:242), DOM4-130-28 (SEQ ID NO:243), DOM4-130-31 (SEQ ID NO:244), DOM4-130-32 (SEQ ID NO:245), DOM4-130-33 (SEQ ID NO:246), DOM4-130-34 (SEQ ID NO:247), DOM4-130-35 (SEQ ID NO:248), DOM4-130-36 (SEQ ID NO:249), DOM4-130-37 (SEQ ID NO:250), DOM4-130-38 (SEQ ID NO:251), DOM4-130-39 (SEQ ID NO:252), DOM4-130-40 (SEQ ID NO:253), DOM4-130-41 (SEQ ID NO:254), DOM4-130-42 (SEQ ID NO:255), DOM4-130-43 (SEQ ID NO:256), DOM4-130-44 (SEQ ID NO:257), DOM4-130-45 (SEQ ID NO:258), DOM4-130-46 (SEQ ID NO:259), DOM4-130-47 (SEQ ID NO:260), DOM4-130-48 (SEQ ID NO:261), DOM4-130-49 (SEQ ID NO:262), DOM4-130-50 (SEQ ID NO:263), DOM4-130-51 (SEQ ID NO:264), DOM4-130-52 (SEQ ID NO:265), DOM4-130-53 (SEQ ID NO:266), DOM4-130-54 (SEQ ID NO:267), DOM4-130-55 (SEQ ID NO:268), DOM4-130-56 (SEQ ID NO:269), DOM4-130-57 (SEQ ID NO:270), DOM4-130-58 (SEQ ID NO:271), DOM4-130-59 (SEQ ID NO:272), DOM4-130-60 (SEQ ID NO:273), DOM4-130-61 (SEQ ID NO:274), DOM4-130-62 (SEQ ID NO:275), DOM4-130-63 (SEQ ID NO:276), DOM4-130-64 (SEQ ID NO:277), DOM4-130-65 (SEQ ID NO:278), DOM4-130-66 (SEQ ID NO:279), DOM4-130-67 (SEQ ID NO:280), DOM4-130-68 (SEQ ID NO:281), DOM4-130-69 (SEQ ID NO:282), DOM4-130-70 (SEQ ID NO:283), DOM4-130-71 (SEQ ID NO:284), DOM4-130-72 (SEQ ID NO:285), DOM4-130-73 (SEQ ID NO:286), DOM4-130-74 (SEQ ID NO:287), DOM4-130-75 (SEQ ID NO:288), DOM4-130-76 (SEQ ID NO:289), DOM4-130-77 (SEQ ID NO:290), DOM4-130-78 (SEQ ID NO:291), DOM4-130-79 (SEQ ID NO:292), DOM4-130-80 (SEQ ID NO:293), DOM4-130-81 (SEQ ID NO:294), DOM4-130-82 (SEQ ID NO:295), DOM4-130-83 (SEQ ID NO:296), DOM4-130-84 (SEQ ID NO:297), DOM4-130-85 (SEQ ID NO:298), DOM4-130-86 (SEQ ID NO:299), DOM4-130-87 (SEQ ID NO:300), DOM4-130-88 (SEQ ID NO:301), DOM4-130-89 (SEQ ID NO:302), DOM4-130-90 (SEQ ID NO:303), DOM4-130-91 (SEQ ID NO:304), DOM4-130-92 (SEQ ID NO:305), DOM4-130-93 (SEQ ID NO:306), DOM4-130-94 (SEQ ID NO:307), DOM4-130-95 (SEQ ID NO:308), DOM4-130-96 (SEQ ID NO:309), DOM4-130-97 (SEQ ID NO:310), DOM4-130-98 (SEQ ID NO:311), DOM4-130-99 (SEQ ID NO:312), DOM4-130-100 (SEQ ID NO:313), DOM4-130-101 (SEQ ID NO:314), DOM4-130-102 (SEQ ID NO:315), DOM4-130-103 (SEQ ID NO:316), DOM4-130-104 (SEQ ID NO:317), DOM4-130-105 (SEQ ID NO:318), DOM4-130-106 (SEQ ID NO:319), DOM4-130-107 (SEQ ID NO:320), DOM4-130-108 (SEQ ID NO:321), DOM4-130-109 (SEQ ID NO:322), DOM4-130-110 (SEQ ID NO:323), DOM4-130-111 (SEQ ID NO:324), DOM4-130-112 (SEQ ID NO:325), DOM4-130-113 (SEQ ID NO:326), DOM4-130-114 (SEQ ID NO:327), DOM4-130-115 (SEQ ID NO:328), DOM4-130-116 (SEQ ID NO:329), DOM4-130-117 (SEQ ID NO:330), DOM4-130-118 (SEQ ID NO:331), DOM4-130-119 (SEQ ID NO:332), DOM4-130-120 (SEQ ID NO:333), DOM4-130-121 (SEQ ID NO:334), DOM4-130-122 (SEQ ID NO:335), DOM4-130-123 (SEQ ID NO:336), DOM4-130-124 (SEQ ID NO:337), DOM4-130-125 (SEQ ID NO:338), DOM4-130-126 (SEQ ID NO:339), DOM4-130-127 (SEQ ID NO:340), DOM4-130-128 (SEQ ID NO:341), DOM4-130-129 (SEQ ID NO:342), DOM4-130-130 (SEQ ID NO:343), DOM4-130-131 (SEQ ID NO:344), DOM4-130-132 (SEQ ID NO:345), DOM4-130-133 (SEQ ID NO:346), DOM4-131 (SEQ ID NO:347), DOM4-132 (SEQ ID NO:348), and DOM4-133 (SEQ ID NO:349).

85. The method of claim 82, wherein said antagonist of IL-1R1 moiety is an immunoglobulin single variable domain that comprises an amino acid sequence that has at least about 90% amino acid sequence identity with an amino acid sequence selected from the group consisting of DOM4-122-23 (SEQ ID NO:1), DOM4-122-24 (SEQ ID NO:2), DOM4-130-30 (SEQ ID NO:3), DOM4-130-46 (SEQ ID NO:4), DOM4-130-51 (SEQ ID NO:5), DOM4-130-53 (SEQ ID NO:6), DOM4-130-54 (SEQ ID NO:7), DOM4-1 (SEQ ID NO:8), DOM4-2 (SEQ ID NO:9), DOM4-3 (SEQ ID NO:10), DOM4-4 (SEQ ID NO:11), DOM4-5 (SEQ ID NO:12), DOM4-6 (SEQ ID NO:13), DOM4-7 (SEQ ID NO:14), DOM4-8 (SEQ ID NO:15), DOM4-9 (SEQ ID NO:16), DOM4-10 (SEQ ID NO:17), DOM4-11 (SEQ ID NO:18), DOM4-12 (SEQ ID NO:19), DOM4-13 (SEQ ID NO:20), DOM4-14 (SEQ ID NO:21), DOM4-15 (SEQ ID NO:22), DOM4-20 (SEQ ID NO:23), DOM4-21 (SEQ ID NO:24), DOM4-22 (SEQ ID NO:25), DOM4-23 (SEQ ID NO:26), DOM4-25 (SEQ ID NO:27), DOM4-26 (SEQ ID NO:28), DOM4-27 (SEQ ID NO:29), DOM4-28 (SEQ ID NO:30), DOM4-29 (SEQ ID NO:31), DOM4-31 (SEQ ID NO:32), DOM4-32 (SEQ ID NO:33), DOM4-33 (SEQ ID NO:34), DOM4-34 (SEQ ID NO:35), DOM4-36 (SEQ ID NO:36), DOM4-37 (SEQ ID NO:37), DOM4-38 (SEQ ID NO:38), DOM4-39 (SEQ ID NO:39), DOM4-40 (SEQ ID NO:40), DOM4-41 (SEQ ID NO:41), DOM4-42 (SEQ ID NO:42), DOM4-44 (SEQ ID NO:43), DOM4-45 (SEQ ID NO:44), DOM4-46 (SEQ ID NO:45), DOM4-49 (SEQ ID NO:46), DOM4-50 (SEQ ID NO:47), DOM4-74 (SEQ ID NO:48), DOM4-75 (SEQ ID NO:49), DOM4-76 (SEQ ID NO:50), DOM4-78 (SEQ ID NO:51), DOM4-79 (SEQ ID NO:52), DOM4-80 (SEQ ID NO:53), DOM4-81 (SEQ ID NO:54), DOM4-82 (SEQ ID NO:55), DOM4-83 (SEQ ID NO:56), DOM4-84 (SEQ ID NO:57), DOM4-85 (SEQ ID NO:58), DOM4-86 (SEQ ID NO:59), DOM4-87 (SEQ ID NO:60), DOM4-88 (SEQ ID NO:61), DOM4-89 (SEQ ID NO:62), DOM4-90 (SEQ ID NO:63), DOM4-91 (SEQ ID NO:64), DOM4-92 (SEQ ID NO:65), DOM4-93 (SEQ ID NO:66), DOM4-94 (SEQ ID NO:67), DOM4-95 (SEQ ID NO:68), DOM4-96 (SEQ ID NO:69), DOM4-97 (SEQ ID NO:70), DOM4-98 (SEQ ID NO:71), DOM4-99 (SEQ ID NO:72), DOM4-100 (SEQ ID NO:73), DOM4-101 (SEQ ID NO:74), DOM4-102 (SEQ ID NO:75), DOM4-103 (SEQ ID NO:76), DOM4-104 (SEQ ID NO:77), DOM4-105 (SEQ ID NO:78), DOM4-106 (SEQ ID NO:79), DOM4-107 (SEQ ID NO:80), DOM4-108 (SEQ ID NO:81), DOM4-109 (SEQ ID NO:82), DOM4-110 (SEQ ID NO:83), DOM4-111 (SEQ ID NO:84), DOM4-112 (SEQ ID NO:85), DOM4-113 (SEQ ID NO:86), DOM4-114 (SEQ ID NO:87), DOM4-115 (SEQ ID NO:88), DOM4-116 (SEQ ID NO:89), DOM4-117 (SEQ ID NO:90), DOM4-118 (SEQ ID NO:91), DOM4-119 (SEQ ID NO:92), DOM4-120 (SEQ ID NO:93), DOM4-121 (SEQ ID NO:94), DOM4-122 (SEQ ID NO:95), DOM4-122-1 (SEQ ID NO:96), DOM4-122-2 (SEQ ID NO:97), DOM4-122-3 (SEQ ID NO:98), DOM4-122-4 (SEQ ID NO:99), DOM4-122-5 (SEQ ID NO:100), DOM4-122-6 (SEQ ID NO:101), DOM4-122-7 (SEQ ID NO:102), DOM4-122-8 (SEQ ID NO:103), DOM4-122-9 (SEQ ID NO:104), DOM4-122-10 (SEQ ID NO:105), DOM4-122-11 (SEQ ID NO:106), DOM4-122-12 (SEQ ID NO:107), DOM4-122-13 (SEQ ID NO:108), DOM4-122-14 (SEQ ID NO:109), DOM4-122-15 (SEQ ID NO:110), DOM4-122-16 (SEQ ID NO:111), DOM4-122-17 (SEQ ID NO:112), DOM4-122-18 (SEQ ID NO:113), DOM4-122-19 (SEQ ID NO:114), DOM4-122-20 (SEQ ID NO:115), DOM4-122-21 (SEQ ID NO:116), DOM4-122-22 (SEQ ID NO:117), DOM4-122-25 (SEQ ID NO:118), DOM4-122-26 (SEQ ID NO:119), DOM4-122-27 (SEQ ID NO:120), DOM4-122-28 (SEQ ID NO:121), DOM4-122-29 (SEQ ID NO:122), DOM4-122-30 (SEQ ID NO:123), DOM4-122-31 (SEQ ID NO:124), DOM4-122-32 (SEQ ID NO:125), DOM4-122-33 (SEQ ID NO:126), DOM4-122-34 (SEQ ID NO:127), DOM4-122-35 (SEQ ID NO:128), DOM4-122-36 (SEQ ID NO:129), DOM4-122-37 (SEQ ID NO:130), DOM4-122-38 (SEQ ID NO:131), DOM4-122-39 (SEQ ID NO:132), DOM4-122-40 (SEQ ID NO:133), DOM4-122-41 (SEQ ID NO:134), DOM4-122-42 (SEQ ID NO:135), DOM4-122-43 (SEQ ID NO:136), DOM4-122-44 (SEQ ID NO:137), DOM4-122-45 (SEQ ID NO:138), DOM4-122-46 (SEQ ID NO:139), DOM4-122-47 (SEQ ID NO:140), DOM4-122-48 (SEQ ID NO:141), DOM4-122-49 (SEQ ID NO:142), DOM4-122-50 (SEQ ID NO:143), DOM4-122-51 (SEQ ID NO:144), DOM4-122-52 (SEQ ID NO:145), DOM4-122-54 (SEQ ID NO:146), DOM4-122-55 (SEQ ID NO:147), DOM4-122-56 (SEQ ID NO:148), DOM4-122-57 (SEQ ID NO:149), DOM4-122-58 (SEQ ID NO:150), DOM4-122-59 (SEQ ID NO:151), DOM4-122-60 (SEQ ID NO:152), DOM4-122-61 (SEQ ID NO:153), DOM4-122-62 (SEQ ID NO:154), DOM4-122-63 (SEQ ID NO:155), DOM4-122-64 (SEQ ID NO:156), DOM4-122-65 (SEQ ID NO:157), DOM4-122-66 (SEQ ID NO:158), DOM4-122-67 (SEQ ID NO:159), DOM4-122-68 (SEQ ID NO:160), DOM4-122-69 (SEQ ID NO:161), DOM4-122-70 (SEQ ID NO:162), DOM4-122-71 (SEQ ID NO:163), DOM4-122-72 (SEQ ID NO:164), DOM4-122-73 (SEQ ID NO:165), DOM4-123 (SEQ ID NO:166), DOM4-124 (SEQ ID NO:167) DOM4-125 (SEQ ID NO:168), DOM4-126 (SEQ ID NO:169), DOM4-127 (SEQ ID NO:170), DOM4-128 (SEQ ID NO:171), DOM4-129 (SEQ ID NO:172), DOM4-129-1 (SEQ ID NO:173), DOM4-129-2 (SEQ ID NO:174), DOM4-129-3 (SEQ ID NO:175), DOM4-129-4 (SEQ ID NO:176), DOM4-129-5 (SEQ ID NO:177), DOM4-129-6 (SEQ ID NO:178), DOM4-129-7 (SEQ ID NO:179), DOM4-129-8 (SEQ ID NO:180), DOM4-129-9 (SEQ ID NO:181), DOM4-129-10 (SEQ ID NO:182), DOM4-129-11 (SEQ ID NO:183), DOM4-129-12 (SEQ ID NO:184), DOM4-129-13 (SEQ ID NO:185), DOM4-129-14 (SEQ ID NO:186), DOM4-129-15 (SEQ ID NO:187), DOM4-129-16 (SEQ ID NO:188), DOM4-129-17 (SEQ ID NO:189), DOM4-129-18 (SEQ ID NO:190), DOM4-129-19 (SEQ ID NO:191), DOM4-129-20 (SEQ ID NO:192), DOM4-129-21 (SEQ ID NO:193), DOM4-129-22 (SEQ ID NO:194), DOM4-129-23 (SEQ ID NO:195), DOM4-129-24 (SEQ ID NO:196), DOM4-129-25 (SEQ ID NO:197), DOM4-129-26 (SEQ ID NO:198), DOM4-129-27 (SEQ ID NO:199), DOM4-129-28 (SEQ ID NO:200), DOM4-129-29 (SEQ ID NO:201), DOM4-129-31 (SEQ ID NO:202), DOM4-129-32 (SEQ ID NO:203), DOM4-129-33 (SEQ ID NO:204), DOM4-129-34 (SEQ ID NO:205), DOM4-129-35 (SEQ ID NO:206), DOM4-129-37 (SEQ ID NO:207), DOM4-129-38 (SEQ ID NO:208), DOM4-129-39 (SEQ ID NO:209), DOM4-129-40 (SEQ ID NO:210), DOM4-129-41 (SEQ ID NO:211), DOM4-129-42 (SEQ ID NO:212), DOM4-129-43 (SEQ ID NO:213), DOM4-129-44 (SEQ ID NO:214), DOM4-130 (SEQ ID NO:215), DOM4-130-1 (SEQ ID NO:216), DOM4-130-2 (SEQ ID NO:217), DOM4-130-3 (SEQ ID NO:218), DOM4-130-4 (SEQ ID NO:219), DOM4-130-5 (SEQ ID NO:220), DOM4-130-6 (SEQ ID NO:221), DOM4-130-7 (SEQ ID NO:222), DOM4-130-8 (SEQ ID NO:223), DOM4-130-9 (SEQ ID NO:224), DOM4-130-10 (SEQ ID NO:225), DOM4-130-11 (SEQ ID NO:226), DOM4-130-12 (SEQ ID NO:227), DOM4-130-13 (SEQ ID NO:228), DOM4-130-14 (SEQ ID NO:229), DOM4-130-15 (SEQ ID NO:230), DOM4-130-16 (SEQ ID NO:231), DOM4-130-17 (SEQ ID NO:232), DOM4-130-18 (SEQ ID NO:233), DOM4-130-19 (SEQ ID NO:234), DOM4-130-20 (SEQ ID NO:235), DOM4-130-21 (SEQ ID NO:236), DOM4-130-22 (SEQ ID NO:237), DOM4-130-23 (SEQ ID NO:238), DOM4-130-24 (SEQ ID NO:239), DOM4-130-25 (SEQ ID NO:240), DOM4-130-26 (SEQ ID NO:241), DOM4-130-27 (SEQ ID NO:242), DOM4-130-28 (SEQ ID NO:243), DOM4-130-31 (SEQ ID NO:244), DOM4-130-32 (SEQ ID NO:245), DOM4-130-33 (SEQ ID NO:246), DOM4-130-34 (SEQ ID NO:247), DOM4-130-35 (SEQ ID NO:248), DOM4-130-36 (SEQ ID NO:249), DOM4-130-37 (SEQ ID NO:250), DOM4-130-38 (SEQ ID NO:251), DOM4-130-39 (SEQ ID NO:252), DOM4-130-40 (SEQ ID NO:253), DOM4-130-41 (SEQ ID NO:254), DOM4-130-42 (SEQ ID NO:255), DOM4-130-43 (SEQ ID NO:256), DOM4-130-44 (SEQ ID NO:257), DOM4-130-45 (SEQ ID NO:258), DOM4-130-46 (SEQ ID NO:259), DOM4-130-47 (SEQ ID NO:260), DOM4-130-48 (SEQ ID NO:261), DOM4-130-49 (SEQ ID NO:262), DOM4-130-50 (SEQ ID NO:263), DOM4-130-51 (SEQ ID NO:264), DOM4-130-52 (SEQ ID NO:265), DOM4-130-53 (SEQ ID NO:266), DOM4-130-54 (SEQ ID NO:267), DOM4-130-55 (SEQ ID NO:268), DOM4-130-56 (SEQ ID NO:269), DOM4-130-57 (SEQ ID NO:270), DOM4-130-58 (SEQ ID NO:271), DOM4-130-59 (SEQ ID NO:272), DOM4-130-60 (SEQ ID NO:273), DOM4-130-61 (SEQ ID NO:274), DOM4-130-62 (SEQ ID NO:275), DOM4-130-63 (SEQ ID NO:276), DOM4-130-64 (SEQ ID NO:277), DOM4-130-65 (SEQ ID NO:278), DOM4-130-66 (SEQ ID NO:279), DOM4-130-67 (SEQ ID NO:280), DOM4-130-68 (SEQ ID NO:281), DOM4-130-69 (SEQ ID NO:282), DOM4-130-70 (SEQ ID NO:283), DOM4-130-71 (SEQ ID NO:284), DOM4-130-72 (SEQ ID NO:285), DOM4-130-73 (SEQ ID NO:286), DOM4-130-74 (SEQ ID NO:287), DOM4-130-75 (SEQ ID NO:288), DOM4-130-76 (SEQ ID NO:289), DOM4-130-77 (SEQ ID NO:290), DOM4-130-78 (SEQ ID NO:291), DOM4-130-79 (SEQ ID NO:292), DOM4-130-80 (SEQ ID NO:293), DOM4-130-81 (SEQ ID NO:294), DOM4-130-82 (SEQ ID NO:295), DOM4-130-83 (SEQ ID NO:296), DOM4-130-84 (SEQ ID NO:297), DOM4-130-85 (SEQ ID NO:298), DOM4-130-86 (SEQ ID NO:299), DOM4-130-87 (SEQ ID NO:300), DOM4-130-88 (SEQ ID NO:301), DOM4-130-89 (SEQ ID NO:302), DOM4-130-90 (SEQ ID NO:303), DOM4-130-91 (SEQ ID NO:304), DOM4-130-92 (SEQ ID NO:305), DOM4-130-93 (SEQ ID NO:306), DOM4-130-94 (SEQ ID NO:307), DOM4-130-95 (SEQ ID NO:308), DOM4-130-96 (SEQ ID NO:309), DOM4-130-97 (SEQ ID NO:310), DOM4-130-98 (SEQ ID NO:311), DOM4-130-99 (SEQ ID NO:312), DOM4-130-100 (SEQ ID NO:313), DOM4-130-101 (SEQ ID NO:314), DOM4-130-102 (SEQ ID NO:315), DOM4-130-103 (SEQ ID NO:316), DOM4-130-104 (SEQ ID NO:317), DOM4-130-105 (SEQ ID NO:318), DOM4-130-106 (SEQ ID NO:319), DOM4-130-107 (SEQ ID NO:320), DOM4-130-108 (SEQ ID NO:321), DOM4-130-109 (SEQ ID NO:322), DOM4-130-110 (SEQ ID NO:323), DOM4-130-111 (SEQ ID NO:324), DOM4-130-112 (SEQ ID NO:325), DOM4-130-113 (SEQ ID NO:326), DOM4-130-114 (SEQ ID NO:327), DOM4-130-115 (SEQ ID NO:328), DOM4-130-116 (SEQ ID NO:329), DOM4-130-117 (SEQ ID NO:330), DOM4-130-118 (SEQ ID NO:331), DOM4-130-119 (SEQ ID NO:332), DOM4-130-120 (SEQ ID NO:333), DOM4-130-121 (SEQ ID NO:334), DOM4-130-122 (SEQ ID NO:335), DOM4-130-123 (SEQ ID NO:336), DOM4-130-124 (SEQ ID NO:337), DOM4-130-125 (SEQ ID NO:338), DOM4-130-126 (SEQ ID NO:339), DOM4-130-127 (SEQ ID NO:340), DOM4-130-128 (SEQ ID NO:341), DOM4-130-129 (SEQ ID NO:342), DOM4-130-130 (SEQ ID NO:343), DOM4-130-131 (SEQ ID NO:344), DOM4-130-132 (SEQ ID NO:345), DOM4-130-133 (SEQ ID NO:346), DOM4-131 (SEQ ID NO:347), DOM4-132 (SEQ ID NO:348), and DOM4-133 (SEQ ID NO:349).

86. The method of claim 82, said half-life extending moiety is serum albumin or a fragment thereof, transferrin receptor or a transferrin-binding portion thereof, or an antibody or antibody fragment comprising a binding site for a polypeptide that enhances half-life in vivo.

87. The method of claim 82, wherein said half-life extending moiety is an antibody or antibody fragment comprising a binding site for serum albumin or neonatal Fc receptor.

88. The method of claim 87, wherein said antibody or antibody fragment is an antibody fragment, and said antibody fragment is an immunoglobulin single variable domain.

89. The method of claim 88, wherein said immunoglobulin single variable domain competes with an immunoglobulin single variable domain selected from the group consisting of DOM7m-16 (SEQ ID NO:723), DOM7m-12 (SEQ ID NO:724), DOM7m-26 (SEQ ID NO:725), DOM7r-1 (SEQ ID NO:726), DOM7r-3 (SEQ ID NO:727), DOM7r-4 (SEQ ID NO:728), DOM7r-5 (SEQ ID NO:729), DOM7r-7 (SEQ ID NO:730), DOM7r-8 (SEQ ID NO:731), DOM7h-2 (SEQ ID NO:732), DOM7h-3 (SEQ ID NO:733), DOM7h-4 (SEQ ID NO:734), DOM7h-6 (SEQ ID NO:735), DOM7h-1 (SEQ ID NO:736), DOM7h-7 (SEQ ID NO:737), DOM7h-22 (SEQ ID NO:739), DOM7h-23 (SEQ ID NO:740), DOM7h-24 (SEQ ID NO:741), DOM7h-25 (SEQ ID NO:742), DOM7h-26 (SEQ ID NO:743), DOM7h-21 (SEQ ID NO:744), DOM7h-27 (SEQ ID NO:745), DOM7h-8 (SEQ ID NO:746), DOM7r-13 (SEQ ID NO:747), DOM7r-14 (SEQ ID NO:748), DOM7r-15 (SEQ ID NO:749), DOM7r-16 (SEQ ID NO:750), DOM7r-17 (SEQ ID NO:751), DOM7r-18 (SEQ ID NO:752), DOM7r-19 (SEQ ID NO:753), DOM7r-20 (SEQ ID NO:754), DOM7r-21 (SEQ ID NO:755), DOM7r-22 (SEQ ID NO:756), DOM7r-23 (SEQ ID NO:757), DOM7r-24 (SEQ ID NO:758), DOM7r-25 (SEQ ID NO:759), DOM7r-26 (SEQ ID NO:760), DOM7r-27 (SEQ ID NO:761), DOM7r-28 (SEQ ID NO:762), DOM7r-29 (SEQ ID NO:763), DOM7r-30 (SEQ ID NO:764), DOM7r-31 (SEQ ID NO:765), DOM7r-32 (SEQ ID NO:766), DOM7r-33 (SEQ ID NO:767), Sequence A (SEQ ID NO:768), Sequence B. (SEQ ID NO:769), Sequence C (SEQ ID NO:770), Sequence D (SEQ ID NO:771), Sequence E (SEQ ID NO:772), Sequence F (SEQ ID NO:773), Sequence G (SEQ ID NO:774), Sequence H (SEQ ID NO:775), Sequence I (SEQ ID NO:776), Sequence J (SEQ ID NO:777), Sequence K (SEQ ID NO:778), Sequence L (SEQ ID NO:779), Sequence M (SEQ ID NO:780), Sequence N (SEQ ID NO:781), Sequence O (SEQ ID NO:782), Sequence P (SEQ ID NO:783), and Sequence Q (SEQ ID NO:784) for binding to human serum albumin.

90. The method of claim 88, wherein said immunoglobulin single variable domain binds human serum albumin comprises an amino acid sequence selected from the group consisting of DOM7m-16 (SEQ ID NO:723), DOM7m-12 (SEQ ID NO:724), DOM7m-26 (SEQ ID NO:725), DOM7r-1 (SEQ ID NO:726), DOM7r-3 (SEQ ID NO:727), DOM7r-4 (SEQ ID NO:728), DOM7r-5 (SEQ ID NO:729), DOM7r-7 (SEQ ID NO:730), DOM7r-8 (SEQ ID NO:731), DOM7h-2 (SEQ ID NO:732), DOM7h-3 (SEQ ID NO:733), DOM7h-4 (SEQ ID NO:734), DOM7h-6 (SEQ ID NO:735), DOM7h-1 (SEQ ID NO:736), DOM7h-7 (SEQ ID NO:737), DOM7h-22 (SEQ ID NO:739), DOM7h-23 (SEQ ID NO:740), DOM7h-24 (SEQ ID NO:741), DOM7h-25 (SEQ ID NO:742), DOM7h-26 (SEQ ID NO:743), DOM7h-21 (SEQ ID NO:744), DOM7h-27 (SEQ ID NO:745), DOM7h-8 (SEQ ID NO:746), DOM7r-13 (SEQ ID NO:747), DOM7r-14 (SEQ ID NO:748), DOM7r-15 (SEQ ID NO:749), DOM7r-16 (SEQ ID NO:750), DOM7r-17 (SEQ ID NO:751), DOM7r-18 (SEQ ID NO:752), DOM7r-19 (SEQ ID NO:753), DOM7r-20 (SEQ ID NO:754), DOM7r-21 (SEQ ID NO:755), DOM7r-22 (SEQ ID NO:756), DOM7r-23 (SEQ ID NO:757), DOM7r-24 (SEQ ID NO:758), DOM7r-25 (SEQ ID NO:759), DOM7r-26 (SEQ ID NO:760), DOM7r-27 (SEQ ID NO:761), DOM7r-28 (SEQ ID NO:762), DOM7r-29 (SEQ ID NO:763), DOM7r-30 (SEQ ID NO:764), DOM7r-31 (SEQ ID NO:765), DOM7r-32 (SEQ ID NO:766), DOM7r-33 (SEQ ID NO:767), Sequence A (SEQ ID NO:768), Sequence B (SEQ ID NO:769), Sequence C (SEQ ID NO:770), Sequence D (SEQ ID NO:771), Sequence E (SEQ ID NO:772), Sequence F (SEQ ID NO:773), Sequence G (SEQ ID NO:774), Sequence H (SEQ ID NO:775), Sequence I (SEQ ID NO:776), Sequence J (SEQ ID NO:777), Sequence K (SEQ ID NO:778), Sequence L (SEQ ID NO:779), Sequence M (SEQ ID NO:780), Sequence N (SEQ ID NO:781), Sequence O (SEQ ID NO:782), Sequence P (SEQ ID NO:783), and Sequence Q (SEQ ID NO:784).

91. The method of claim 82, wherein said respiratory disease is selected from the group consisting of lung inflammation, chronic obstructive pulmonary disease, asthma, pneumonia, hypersensitivity pneumonitis, pulmonary infiltrate with eosinophilia, environmental lung disease, pneumonia, bronchiectasis, cystic fibrosis, interstitial lung disease, primary pulmonary hypertension, pulmonary thromboembolism, disorders of the pleura, disorders of the mediastinum, disorders of the diaphragm, hypoventilation, hyperventilation, sleep apnea, acute respiratory distress syndrome, mesothelioma, sarcoma, graft rejection, graft versus host disease, lung cancer, allergic rhinitis, allergy, asbestosis, aspergilloma, aspergillosis, bronchiectasis, chronic bronchitis, emphysema, eosinophilic pneumonia, idiopathic pulmonary fibrosis, invasive pneumococcal disease, influenza, nontuberculous mycobacteria, pleural effusion, pneumoconiosis, pneumocytosis, pneumonia, pulmonary actinomycosis, pulmonary alveolar proteinosis, pulmonary anthrax, pulmonary edema, pulmonary embolus, pulmonary inflammation, pulmonary histiocytosis X, pulmonary hypertension, pulmonary nocardiosis, pulmonary tuberculosis, pulmonary veno-occlusive disease, rheumatoid lung disease, sarcoidosis, and Wegener's granulomatosis.

92. A method for treating a respiratory disease, comprising administering to a subject in need thereof a therapeutically effective amount of an antagonist of Interleukin-1 Receptor Type 1 (IL-1R1), wherein said antagonist of IL-1R1 comprises an immunoglobulin single variable domain that has binding specificity for human IL-1R1 and inhibits binding of Interleukin-1 (IL-1) to human IL-1R1, and a polyethylene glycol moiety.

93. The method of claim 92, wherein said immunoglobulin single variable domain competes for binding to human IL-1R1 with a dAb selected from the group consisting of DOM4-122-23 (SEQ ID NO:1), DOM4-122-24 (SEQ ID NO:2), DOM4-130-30 (SEQ ID NO:3), DOM4-130-46 (SEQ ID NO:4), DOM4-130-51 (SEQ ID NO:5), DOM4-130-53 (SEQ ID NO:6), DOM4-130-54 (SEQ ID NO:7), DOM4-1 (SEQ ID NO:8), DOM4-2 (SEQ ID NO:9), DOM4-3 (SEQ ID NO:10), DOM4-4 (SEQ ID NO:1), DOM4-5 (SEQ ID NO:12), DOM4-6 (SEQ ID NO:13), DOM4-7 (SEQ ID NO:14), DOM4-8 (SEQ ID NO:15), DOM4-9 (SEQ ID NO:16), DOM4-10 (SEQ ID NO:17), DOM4-11 (SEQ ID NO:18), DOM4-12 (SEQ ID NO:19), DOM4-13 (SEQ ID NO:20), DOM4-14 (SEQ ID NO:21), DOM4-15 (SEQ ID NO:22), DOM4-20 (SEQ ID NO:23), DOM4-21 (SEQ ID NO:24), DOM4-22 (SEQ ID NO:25), DOM4-23 (SEQ ID NO:26), DOM4-25 (SEQ ID NO:27), DOM4-26 (SEQ ID NO:28), DOM4-27 (SEQ ID NO:29), DOM4-28 (SEQ ID NO:30), DOM4-29 (SEQ ID NO:31), DOM4-31 (SEQ ID NO:32), DOM4-32 (SEQ ID NO:33), DOM4-33 (SEQ ID NO:34), DOM4-34 (SEQ ID NO:35), DOM4-36 (SEQ ID NO:36), DOM4-37 (SEQ ID NO:37), DOM4-38 (SEQ ID NO:38), DOM4-39 (SEQ ID NO:39), DOM4-40 (SEQ ID NO:40), DOM4-41 (SEQ ID NO:41), DOM4-42 (SEQ ID NO:42), DOM4-44 (SEQ ID NO:43), DOM4-45 (SEQ ID NO:44), DOM4-46 (SEQ ID NO:45), DOM4-49 (SEQ ID NO:46), DOM4-50 (SEQ ID NO:47), DOM4-74 (SEQ ID NO:48), DOM4-75 (SEQ ID NO:49), DOM4-76 (SEQ ID NO:50), DOM4-78 (SEQ ID NO:51), DOM4-79 (SEQ ID NO:52), DOM4-80 (SEQ ID NO:53), DOM4-81 (SEQ ID NO:54), DOM4-82 (SEQ ID NO:55), DOM4-83 (SEQ ID NO:56), DOM4-84 (SEQ ID NO:57), DOM4-85 (SEQ ID NO:58), DOM4-86 (SEQ ID NO:59), DOM4-87 (SEQ TD NO:60), DOM4-88 (SEQ ID NO:61), DOM4-89 (SEQ ID NO:62), DOM4-90 (SEQ ID NO:63), DOM4-91 (SEQ ID NO:64), DOM4-92 (SEQ ID NO:65), DOM4-93 (SEQ ID NO:66), DOM4-94 (SEQ ID NO:67), DOM4-95 (SEQ ID NO:68), DOM4-96 (SEQ ID NO:69), DOM4-97 (SEQ ID NO:70), DOM4-98 (SEQ ID NO:71), DOM4-99 (SEQ ID NO:72), DOM4-100 (SEQ ID NO:73), DOM4-101 (SEQ ID NO:74), DOM4-102 (SEQ ID NO:75), DOM4-103 (SEQ ID NO:76), DOM4-104 (SEQ ID NO:77), DOM4-105 (SEQ ID NO:78), DOM4-106 (SEQ ID NO:79), DOM4-107 (SEQ ID NO:80), DOM4-108 (SEQ ID NO:81), DOM4-109 (SEQ ID NO:82), DOM4-110 (SEQ ID NO:83), DOM4-111 (SEQ ID NO:84), DOM4-112 (SEQ ID NO:85), DOM4-113 (SEQ ID NO:86), DOM4-114 (SEQ ID NO:87), DOM4-115 (SEQ ID NO:88), DOM4-116 (SEQ ID NO:89), DOM4-117 (SEQ ID NO:90), DOM4-118 (SEQ ID NO:91), DOM4-119 (SEQ ID NO:92), DOM4-120 (SEQ ID NO:93), DOM4-121 (SEQ ID NO:94), DOM4-122 (SEQ ID NO:95), DOM4-122-1 (SEQ ID NO:96), DOM4-122-2 (SEQ ID NO:97), DOM4-122-3 (SEQ ID NO:98), DOM4-122-4 (SEQ ID NO:99), DOM4-122-5 (SEQ ID NO:100), DOM4-122-6 (SEQ ID NO:101), DOM4-122-7 (SEQ ID NO:102), DOM4-122-8 (SEQ ID NO:103), DOM4-122-9 (SEQ ID NO:104), DOM4-122-10 (SEQ ID NO:105), DOM4-122-11 (SEQ ID NO:106), DOM4-122-12 (SEQ ID NO:107), DOM4-122-13 (SEQ ID NO:108), DOM4-122-14 (SEQ ID NO:109), DOM4-122-15 (SEQ ID NO:110), DOM4-122-16 (SEQ ID NO:111), DOM4-122-17 (SEQ ID NO:112), DOM4-122-18 (SEQ ID NO:113), DOM4-122-19 (SEQ ID NO:114), DOM4-122-20 (SEQ ID NO:115), DOM4-122-21 (SEQ ID NO:116), DOM4-122-22 (SEQ ID NO:117), DOM4-122-25 (SEQ ID NO:118), DOM4-122-26 (SEQ ID NO:119), DOM4-122-27 (SEQ ID NO:120), DOM4-122-28 (SEQ ID NO:121), DOM4-122-29 (SEQ ID NO:122), DOM4-122-30 (SEQ ID NO:123), DOM4-122-31 (SEQ ID NO:124), DOM4-122-32 (SEQ ID NO:125), DOM4-122-33 (SEQ ID NO:126), DOM4-122-34 (SEQ ID NO:127), DOM4-122-35 (SEQ ID NO:128), DOM4-122-36 (SEQ ID NO:129), DOM4-122-37 (SEQ ID NO:130), DOM4-122-38 (SEQ ID NO:131), DOM4-122-39 (SEQ ID NO:132), DOM4-122-40 (SEQ ID NO:133), DOM4-122-41 (SEQ ID NO:134), DOM4-122-42 (SEQ ID NO:135), DOM4-122-43 (SEQ ID NO:136), DOM4-122-44 (SEQ ID NO:137), DOM4-122-45 (SEQ ID NO:138), DOM4-122-46 (SEQ ID NO:139), DOM4-122-47 (SEQ ID NO:140), DOM4-122-48 (SEQ ID NO:141), DOM4-122-49 (SEQ ID NO:142), DOM4-122-50 (SEQ ID NO:143), DOM4-122-51 (SEQ ID NO:144), DOM4-122-52 (SEQ ID NO:145), DOM4-122-54 (SEQ ID NO:146), DOM4-122-55 (SEQ ID NO:147), DOM4-122-56 (SEQ ID NO:148), DOM4-122-57 (SEQ ID NO:149), DOM4-122-58 (SEQ ID NO:150), DOM4-122-59 (SEQ ID NO:151), DOM4-122-60 (SEQ ID NO:152), DOM4-122-61 (SEQ ID NO:153), DOM4-122-62 (SEQ ID NO:154), DOM4-122-63 (SEQ ID NO:155), DOM4-122-64 (SEQ ID NO:156), DOM4-122-65 (SEQ ID NO:157), DOM4-122-66 (SEQ ID NO:158), DOM4-122-67 (SEQ ID NO:159), DOM4-122-68 (SEQ ID NO:160), DOM4-122-69 (SEQ ID NO:161), DOM4-122-70 (SEQ ID NO:162), DOM4-122-71 (SEQ ID NO:163), DOM4-122-72 (SEQ ID NO:164), DOM4-122-73 (SEQ ID NO:165), DOM4-123 (SEQ ID NO:166), DOM4-124 (SEQ ID NO:167) DOM4-125 (SEQ ID NO:168), DOM4-126 (SEQ ID NO:169), DOM4-127 (SEQ ID NO:170), DOM4-128 (SEQ ID NO:171), DOM4-129 (SEQ ID NO:172), DOM4-129-1 (SEQ ID NO:173), DOM4-129-2 (SEQ ID NO:174), DOM4-129-3 (SEQ ID NO:175), DOM4-129-4 (SEQ ID NO:176), DOM4-129-5 (SEQ ID NO:177), DOM4-129-6 (SEQ ID NO:178), DOM4-129-7 (SEQ ID NO:179), DOM4-129-8 (SEQ ID NO:180), DOM4-129-9 (SEQ ID NO:181), DOM4-129-10 (SEQ ID NO:182), DOM4-129-11 (SEQ ID NO:183), DOM4-129-12 (SEQ ID NO:184), DOM4-129-13 (SEQ ID NO:185), DOM4-129-14 (SEQ ID NO:186), DOM4-129-15 (SEQ ID NO:187), DOM4-129-16 (SEQ ID NO:188), DOM4-129-17 (SEQ ID NO:189), DOM4-129-18 (SEQ ID NO:190), DOM4-129-19 (SEQ ID NO:191), DOM4-129-20 (SEQ ID NO:192), DOM4-129-21 (SEQ ID NO:193), DOM4-129-22 (SEQ ID NO:194), DOM4-129-23 (SEQ ID NO:195), DOM4-129-24 (SEQ ID NO:196), DOM4-129-25 (SEQ ID NO:197), DOM4-129-26 (SEQ ID NO:198), DOM4-129-27 (SEQ ID NO:199), DOM4-129-28 (SEQ ID NO:200), DOM4-129-29 (SEQ ID NO:201), DOM4-129-31 (SEQ ID NO:202), DOM4-129-32 (SEQ ID NO:203), DOM4-129-33 (SEQ ID NO:204), DOM4-129-34 (SEQ ID NO:205), DOM4-129-35 (SEQ ID NO:206), DOM4-129-37 (SEQ ID NO:207), DOM4-129-38 (SEQ ID NO:208), DOM4-129-39 (SEQ ID NO:209), DOM4-129-40 (SEQ ID NO:210), DOM4-129-41 (SEQ ID NO:211), DOM4-129-42 (SEQ ID NO:212), DOM4-129-43 (SEQ ID NO:213), DOM4-129-44 (SEQ ID NO:214), DOM4-130 (SEQ ID NO:215), DOM4-130-1 (SEQ ID NO:216), DOM4-130-2 (SEQ ID NO:217), DOM4-130-3 (SEQ ID NO:218), DOM4-130-4 (SEQ ID NO:219), DOM4-130-5 (SEQ ID NO:220), DOM4-130-6 (SEQ ID NO:221), DOM4-130-7 (SEQ ID NO:222), DOM4-130-8 (SEQ ID NO:223), DOM4-130-9 (SEQ ID NO:224), DOM4-130-10 (SEQ ID NO:225), DOM4-130-11 (SEQ ID NO:226), DOM4-130-12 (SEQ ID NO:227), DOM4-130-13 (SEQ ID NO:228), DOM4-130-14 (SEQ ID NO:229), DOM4-130-15 (SEQ ID NO:230), DOM4-130-16 (SEQ ID NO:231), DOM4-130-17 (SEQ ID NO:232), DOM4-130-18 (SEQ ID NO:233), DOM4-130-19 (SEQ ID NO:234), DOM4-130-20 (SEQ ID NO:235), DOM4-130-21 (SEQ ID NO:236), DOM4-130-22 (SEQ ID NO:237), DOM4-130-23 (SEQ ID NO:238), DOM4-130-24 (SEQ ID NO:239), DOM4-130-25 (SEQ ID NO:240), DOM4-130-26 (SEQ ID NO:241), DOM4-130-27 (SEQ ID NO:242), DOM4-130-28 (SEQ ID NO:243), DOM4-130-31 (SEQ ID NO:244), DOM4-130-32 (SEQ ID NO:245), DOM4-130-33 (SEQ ID NO:246), DOM4-130-34 (SEQ ID NO:247), DOM4-130-35 (SEQ ID NO:248), DOM4-130-36 (SEQ ID NO:249), DOM4-130-37 (SEQ ID NO:250), DOM4-130-38 (SEQ ID NO:251), DOM4-130-39 (SEQ ID NO:252), DOM4-130-40 (SEQ ID NO:253), DOM4-130-41 (SEQ ID NO:254), DOM4-130-42 (SEQ ID NO:255), DOM4-130-43 (SEQ ID NO:256), DOM4-130-44 (SEQ ID NO:257), DOM4-130-45 (SEQ ID NO:258), DOM4-130-46 (SEQ ID NO:259), DOM4-130-47 (SEQ ID NO:260), DOM4-130-48 (SEQ ID NO:261), DOM4-130-49 (SEQ ID NO:262), DOM4-130-50 (SEQ ID NO:263), DOM4-130-51 (SEQ ID NO:264), DOM4-130-52 (SEQ ID NO:265), DOM4-130-53 (SEQ ID NO:266), DOM4-130-54 (SEQ ID NO:267), DOM4-130-55 (SEQ ID NO:268), DOM4-130-56 (SEQ ID NO:269), DOM4-130-57 (SEQ ID NO:270), DOM4-130-58 (SEQ ID NO:271), DOM4-130-59 (SEQ ID NO:272), DOM4-130-60 (SEQ ID NO:273), DOM4-130-61 (SEQ ID NO:274), DOM4-130-62 (SEQ ID NO:275), DOM4-130-63 (SEQ ID NO:276), DOM4-130-64 (SEQ ID NO:277), DOM4-130-65 (SEQ ID NO:278), DOM4-130-66 (SEQ ID NO:279), DOM4-130-67 (SEQ ID NO:280), DOM4-130-68 (SEQ ID NO:281), DOM4-130-69 (SEQ ID NO:282), DOM4-130-70 (SEQ ID NO:283), DOM4-130-71 (SEQ ID NO:284), DOM4-130-72 (SEQ ID NO:285), DOM4-130-73 (SEQ ID NO:286), DOM4-130-74 (SEQ ID NO:287), DOM4-130-75 (SEQ ID NO:288), DOM4-130-76 (SEQ ID NO:289), DOM4-130-77 (SEQ ID NO:290), DOM4-130-78 (SEQ ID NO:291), DOM4-130-79 (SEQ ID NO:292), DOM4-130-80 (SEQ ID NO:293), DOM4-130-81 (SEQ ID NO:294), DOM4-130-82 (SEQ ID NO:295), DOM4-130-83 (SEQ ID NO:296), DOM4-130-84 (SEQ ID NO:297), DOM4-130-85 (SEQ ID NO:298), DOM4-130-86 (SEQ ID NO:299), DOM4-130-87 (SEQ ID NO:300), DOM4-130-88 (SEQ ID NO:301), DOM4-130-89 (SEQ ID NO:302), DOM4-130-90 (SEQ ID NO:303), DOM4-130-91 (SEQ ID NO:304), DOM4-130-92 (SEQ ID NO:305), DOM4-130-93 (SEQ ID NO:306), DOM4-130-94 (SEQ ID NO:307), DOM4-130-95 (SEQ ID NO:308), DOM4-130-96 (SEQ ID NO:309), DOM4-130-97 (SEQ ID NO:310), DOM4-130-98 (SEQ ID NO:311), DOM4-130-99 (SEQ ID NO:312), DOM4-130-100 (SEQ ID NO:313), DOM4-130-101 (SEQ ID NO:314), DOM4-130-102 (SEQ ID NO:315), DOM4-130-103 (SEQ ID NO:316), DOM4-130-104 (SEQ ID NO:317), DOM4-130-105 (SEQ ID NO:318), DOM4-130-106 (SEQ ID NO:319), DOM4-130-107 (SEQ ID NO:320), DOM4-130-108 (SEQ ID NO:321), DOM4-130-109 (SEQ ID NO:322), DOM4-130-110 (SEQ ID NO:323), DOM4-130-111 (SEQ ID NO:324), DOM4-130-112 (SEQ ID NO:325), DOM4-130-113 (SEQ ID NO:326), DOM4-130-114 (SEQ ID NO:327), DOM4-130-115 (SEQ ID NO:328), DOM4-130-116 (SEQ ID NO:329), DOM4-130-117 (SEQ ID NO:330), DOM4-130-118 (SEQ ID NO:331), DOM4-130-119 (SEQ ID NO:332), DOM4-130-120 (SEQ ID NO:333), DOM4-130-121 (SEQ ID NO:334), DOM4-130-122 (SEQ ID NO:335), DOM4-130-123 (SEQ ID NO:336), DOM4-130-124 (SEQ ID NO:337), DOM4-130-125 (SEQ ID NO:338), DOM4-130-126 (SEQ ID NO:339), DOM4-130-127 (SEQ ID NO:340), DOM4-130-128 (SEQ ID NO:341), DOM4-130-129 (SEQ ID NO:342), DOM4-130-130 (SEQ ID NO:343), DOM4-130-131 (SEQ ID NO:344), DOM4-130-132 (SEQ ID NO:345), DOM4-130-133 (SEQ ID NO:346), DOM4-131 (SEQ ID NO:347), DOM4-132 (SEQ ID NO:348), and DOM4-133 (SEQ ID NO:349).

94. The method of claim 92, wherein said immunoglobulin single variable domain binds human serum albumin comprises an amino acid sequence selected from the group consisting of DOM4-122-23 (SEQ ID NO:1), DOM4-122-24 (SEQ ID NO:2), DOM4-130-30 (SEQ ID NO:3), DOM4-130-46 (SEQ ID NO:4), DOM4-130-51 (SEQ ID NO:5), DOM4-130-53 (SEQ ID NO:6), DOM4-130-54 (SEQ ID NO:7), DOM4-1 (SEQ ID NO:8), DOM4-2 (SEQ ID NO:9), DOM4-3 (SEQ ID NO:10), DOM4-4 (SEQ ID NO:11), DOM4-5 (SEQ ID NO:12), DOM4-6 (SEQ ID NO:13), DOM4-7 (SEQ ID NO:14), DOM4-8 (SEQ ID NO:15), DOM4-9 (SEQ ID NO:16), DOM4-10 (SEQ ID NO:17), DOM4-11 (SEQ ID NO:18), DOM4-12 (SEQ ID NO:19), DOM4-13 (SEQ ID NO:20), DOM4-14 (SEQ ID NO:21), DOM4-15 (SEQ ID NO:22), DOM4-20 (SEQ ID NO:23), DOM4-21 (SEQ ID NO:24), DOM4-22 (SEQ ID NO:25), DOM4-23 (SEQ ID NO:26), DOM4-25 (SEQ ID NO:27), DOM4-26 (SEQ ID NO:28), DOM4-27 (SEQ ID NO:29), DOM4-28 (SEQ ID NO:30), DOM4-29 (SEQ ID NO:31), DOM4-31 (SEQ ID NO:32), DOM4-32 (SEQ ID NO:33), DOM4-33 (SEQ ID NO:34), DOM4-34 (SEQ ID NO:35), DOM4-36 (SEQ ID NO:36), DOM4-37 (SEQ ID NO:37), DOM4-38 (SEQ ID NO:38), DOM4-39 (SEQ ID NO:39), DOM4-40 (SEQ ID NO:40), DOM4-41 (SEQ ID NO:41), DOM4-42 (SEQ ID NO:42), DOM4-44 (SEQ ID NO:43), DOM4-45 (SEQ ID NO:44), DOM4-46 (SEQ ID NO:45), DOM4-49 (SEQ ID NO:46), DOM4-50 (SEQ ID NO:47), DOM4-74 (SEQ ID NO:48), DOM4-75 (SEQ ID NO:49), DOM4-76 (SEQ ID NO:50), DOM4-78 (SEQ ID NO:51), DOM4-79 (SEQ ID NO:52), DOM4-80 (SEQ ID NO:53), DOM4-81 (SEQ ID NO:54), DOM4-82 (SEQ ID NO:55), DOM4-83 (SEQ ID NO:56), DOM4-84 (SEQ ID NO:57), DOM4-85 (SEQ ID NO:58), DOM4-86 (SEQ ID NO:59), DOM4-87 (SEQ ID NO:60), DOM4-88 (SEQ ID NO:61), DOM4-89 (SEQ ID NO:62), DOM4-90 (SEQ ID NO:63), DOM4-91 (SEQ ID NO:64), DOM4-92 (SEQ ID NO:65), DOM4-93 (SEQ ID NO:66), DOM4-94 (SEQ ID NO:67), DOM4-95 (SEQ ID NO:68), DOM4-96 (SEQ ID NO:69), DOM4-97 (SEQ ID NO:70), DOM4-98 (SEQ ID NO:71), DOM4-99 (SEQ ID NO:72), DOM4-100 (SEQ ID NO:73), DOM4-101 (SEQ ID NO:74), DOM4-102 (SEQ ID NO:75), DOM4-103 (SEQ ID NO:76), DOM4-104 (SEQ ID NO:77), DOM4-105 (SEQ ID NO:78), DOM4-106 (SEQ ID NO:79), DOM4-107 (SEQ ID NO:80), DOM4-108 (SEQ ID NO:81), DOM4-109 (SEQ ID NO:82), DOM4-110 (SEQ ID NO:83), DOM4-111 (SEQ ID NO:84), DOM4-112 (SEQ ID NO:85), DOM4-113 (SEQ ID NO:86), DOM4-114 (SEQ ID NO:87), DOM4-115 (SEQ ID NO:88), DOM4-116 (SEQ ID NO:89), DOM4-117 (SEQ ID NO:90), DOM4-118 (SEQ ID NO:91), DOM4-119 (SEQ ID NO:92), DOM4-120 (SEQ ID NO:93), DOM4-121 (SEQ ID NO:94), DOM4-122 (SEQ ID NO:95), DOM4-122-1 (SEQ ID NO:96), DOM4-122-2 (SEQ ID NO:97), DOM4-122-3 (SEQ ID NO:98), DOM4-122-4 (SEQ ID NO:99), DOM4-122-5 (SEQ ID NO:100), DOM4-122-6 (SEQ ID NO:101), DOM4-122-7 (SEQ ID NO:102), DOM4-122-8 (SEQ ID NO:103), DOM4-122-9 (SEQ ID NO:104), DOM4-122-10 (SEQ ID NO:105), DOM4-122-11 (SEQ ID NO:106), DOM4-122-12 (SEQ ID NO:107), DOM4-122-13 (SEQ ID NO:108), DOM4-122-14 (SEQ ID NO:109), DOM4-122-15 (SEQ ID NO:110), DOM4-122-16 (SEQ ID NO:111), DOM4-122-17 (SEQ ID NO:112), DOM4-122-18 (SEQ ID NO:113), DOM4-122-19 (SEQ ID NO:114), DOM4-122-20 (SEQ ID NO:115), DOM4-122-21 (SEQ ID NO:116), DOM4-122-22 (SEQ ID NO:117), DOM4-122-25 (SEQ ID NO:118), DOM4-122-26 (SEQ ID NO:119), DOM4-122-27 (SEQ ID NO:120), DOM4-122-28 (SEQ ID NO:121), DOM4-122-29 (SEQ ID NO:122), DOM4-122-30 (SEQ ID NO:123), DOM4-122-31 (SEQ ID NO:124), DOM4-122-32 (SEQ ID NO:125), DOM4-122-33 (SEQ ID NO:126), DOM4-122-34 (SEQ ID NO:127), DOM4-122-35 (SEQ ID NO:128), DOM4-122-36 (SEQ ID NO:129), DOM4-122-37 (SEQ ID NO:130), DOM4-122-38 (SEQ ID NO: 131), DOM4-122-39 (SEQ ID NO:132), DOM4-122-40 (SEQ ID NO:133), DOM4-122-41 (SEQ ID NO:134), DOM4-122-42 (SEQ ID NO:135), DOM4-122-43 (SEQ ID NO:136), DOM4-122-44 (SEQ ID NO:137), DOM4-122-45 (SEQ ID NO:138), DOM4-122-46 (SEQ ID NO:139), DOM4-122-47 (SEQ ID NO:140), DOM4-122-48 (SEQ ID NO:141), DOM4-122-49 (SEQ ID NO:142), DOM4-122-50 (SEQ ID NO:143), DOM4-122-51 (SEQ ID NO:144), DOM4-122-52 (SEQ ID NO:145), DOM4-122-54 (SEQ ID NO:146), DOM4-122-55 (SEQ ID NO:147), DOM4-122-56 (SEQ ID NO:148), DOM4-122-57 (SEQ ID NO:149), DOM4-122-58 (SEQ ID NO:150), DOM4-122-59 (SEQ ID NO:151), DOM4-122-60 (SEQ ID NO:152), DOM4-122-61 (SEQ ID NO:153), DOM4-122-62 (SEQ ID NO:154), DOM4-122-63 (SEQ ID NO:155), DOM4-122-64 (SEQ ID NO:156), DOM4-122-65 (SEQ ID NO:157), DOM4-122-66 (SEQ ID NO:158), DOM4-122-67 (SEQ ID NO:159), DOM4-122-68 (SEQ ID NO:160), DOM4-122-69 (SEQ ID NO:161), DOM4-122-70 (SEQ ID NO:162), DOM4-122-71 (SEQ ID NO:163), DOM4-122-72 (SEQ ID NO:164), DOM4-122-73 (SEQ ID NO:165), DOM4-123 (SEQ ID NO:166), DOM4-124 (SEQ ID NO:167) DOM4-125 (SEQ ID NO:168), DOM4-126 (SEQ ID NO:169), DOM4-127 (SEQ ID NO:170), DOM4-128 (SEQ ID NO:171), DOM4-129 (SEQ ID NO:172), DOM4-129-1 (SEQ ID NO:173), DOM4-129-2 (SEQ ID NO:174), DOM4-129-3 (SEQ ID NO:175), DOM4-129-4 (SEQ ID NO:176), DOM4-129-5 (SEQ ID NO:177), DOM4-129-6 (SEQ ID NO:178), DOM4-129-7 (SEQ ID NO:179), DOM4-129-8 (SEQ ID NO:180), DOM4-129-9 (SEQ ID NO:181), DOM4-129-10 (SEQ ID NO:182), DOM4-129-11 (SEQ ID NO:183), DOM4-129-12 (SEQ ID NO:184), DOM4-129-13 (SEQ ID NO:185), DOM4-129-14 (SEQ ID NO:186), DOM4-129-15 (SEQ ID NO:187), DOM4-129-16 (SEQ ID NO:188), DOM4-129-17 (SEQ ID NO:189), DOM4-129-18 (SEQ ID NO:190), DOM4-129-19 (SEQ ID NO:191), DOM4-129-20 (SEQ ID NO:192), DOM4-129-21 (SEQ ID NO:193), DOM4-129-22 (SEQ ID NO:194), DOM4-129-23 (SEQ ID NO:195), DOM4-129-24 (SEQ ID NO:196), DOM4-129-25 (SEQ ID NO:197), DOM4-129-26 (SEQ ID NO:198), DOM4-129-27 (SEQ ID NO:199), DOM4-129-28 (SEQ ID NO:200), DOM4-129-29 (SEQ ID NO:201), DOM4-129-31 (SEQ ID NO:202), DOM4-129-32 (SEQ ID NO:203), DOM4-129-33 (SEQ ID NO:204), DOM4-129-34 (SEQ ID NO:205), DOM4-129-35 (SEQ ID NO:206), DOM4-129-37 (SEQ ID NO:207), DOM4-129-38 (SEQ ID NO:208), DOM4-129-39 (SEQ ID NO:209), DOM4-129-40 (SEQ ID NO:210), DOM4-129-41 (SEQ ID NO:211), DOM4-129-42 (SEQ ID NO:212), DOM4-129-43 (SEQ ID NO:213), DOM4-129-44 (SEQ ID NO:214), DOM4-130 (SEQ ID NO:215), DOM4-130-1 (SEQ ID NO:216), DOM4-130-2 (SEQ ID NO:217), DOM4-130-3 (SEQ ID NO:218), DOM4-130-4 (SEQ ID NO:219), DOM4-130-5 (SEQ ID NO:220), DOM4-130-6 (SEQ ID NO:221), DOM4-130-7 (SEQ ID NO:222), DOM4-130-8 (SEQ ID NO:223), DOM4-130-9 (SEQ ID NO:224), DOM4-130-10 (SEQ ID NO:225), DOM4-130-11 (SEQ ID NO:226), DOM4-130-12 (SEQ ID NO:227), DOM4-130-13 (SEQ ID NO:228), DOM4-130-14 (SEQ ID NO:229), DOM4-130-15 (SEQ ID NO:230), DOM4-130-16 (SEQ ID NO:231), DOM4-130-17 (SEQ ID NO:232), DOM4-130-18 (SEQ ID NO:233), DOM4-130-19 (SEQ ID NO:234), DOM4-130-20 (SEQ ID NO:235), DOM4-130-21 (SEQ ID NO:236), DOM4-130-22 (SEQ ID NO:237), DOM4-130-23 (SEQ ID NO:238), DOM4-130-24 (SEQ ID NO:239), DOM4-130-25 (SEQ ID NO:240), DOM4-130-26 (SEQ ID NO:241), DOM4-130-27 (SEQ ID NO:242), DOM4-130-28 (SEQ ID NO:243), DOM4-130-31 (SEQ ID NO:244), DOM4-130-32 (SEQ ID NO:245), DOM4-130-33 (SEQ ID NO:246), DOM4-130-34 (SEQ ID NO:247), DOM4-130-35 (SEQ ID NO:248), DOM4-130-36 (SEQ ID NO:249), DOM4-130-37 (SEQ ID NO:250), DOM4-130-38 (SEQ ID NO:251), DOM4-130-39 (SEQ ID NO:252), DOM4-130-40 (SEQ ID NO:253), DOM4-130-41 (SEQ ID NO:254), DOM4-130-42 (SEQ ID NO:255), DOM4-130-43 (SEQ ID NO:256), DOM4-130-44 (SEQ ID NO:257), DOM4-130-45 (SEQ ID NO:258), DOM4-130-46 (SEQ ID NO:259), DOM4-130-47 (SEQ ID NO:260), DOM4-130-48 (SEQ ID NO:261), DOM4-130-49 (SEQ ID NO:262), DOM4-130-50 (SEQ ID NO:263), DOM4-130-51 (SEQ ID NO:264), DOM4-130-52 (SEQ ID NO:265), DOM4-130-53 (SEQ ID NO:266), DOM4-130-54 (SEQ ID NO:267), DOM4-130-55 (SEQ ID NO:268), DOM4-130-56 (SEQ ID NO:269), DOM4-130-57 (SEQ ID NO:270), DOM4-130-58 (SEQ ID NO:271), DOM4-130-59 (SEQ ID NO:272), DOM4-130-60 (SEQ ID NO:273), DOM4-130-61 (SEQ ID NO:274), DOM4-130-62 (SEQ ID NO:275), DOM4-130-63 (SEQ ID NO:276), DOM4-130-64 (SEQ ID NO:277), DOM4-130-65 (SEQ ID NO:278), DOM4-130-66 (SEQ ID NO:279), DOM4-130-67 (SEQ ID NO:280), DOM4-130-68 (SEQ ID NO:281), DOM4-130-69 (SEQ ID NO:282), DOM4-130-70 (SEQ ID NO:283), DOM4-130-71 (SEQ ID NO:284), DOM4-130-72 (SEQ ID NO:285), DOM4-130-73 (SEQ ID NO:286), DOM4-130-74 (SEQ ID NO:287), DOM4-130-75 (SEQ ID NO:288), DOM4-130-76 (SEQ ID NO:289), DOM4-130-77 (SEQ ID NO:290), DOM4-130-78 (SEQ ID NO:291), DOM4-130-79 (SEQ ID NO:292), DOM4-130-80 (SEQ ID NO:293), DOM4-130-81 (SEQ ID NO:294), DOM4-130-82 (SEQ ID NO:295), DOM4-130-83 (SEQ ID NO:296), DOM4-130-84 (SEQ ID NO:297), DOM4-130-85 (SEQ ID NO:298), DOM4-130-86 (SEQ ID NO:299), DOM4-130-87 (SEQ ID NO:300), DOM4-130-88 (SEQ ID NO:301), DOM4-130-89 (SEQ ID NO:302), DOM4-130-90 (SEQ ID NO:303), DOM4-130-91 (SEQ ID NO:304), DOM4-130-92 (SEQ ID NO:305), DOM4-130-93 (SEQ ID NO:306), DOM4-130-94 (SEQ ID NO:307), DOM4-130-95 (SEQ ID NO:308), DOM4-130-96 (SEQ ID NO:309), DOM4-130-97 (SEQ ID NO:310), DOM4-130-98 (SEQ ID NO:311), DOM4-130-99 (SEQ ID NO:312), DOM4-130-100 (SEQ ID NO:313), DOM4-130-101 (SEQ ID NO:314), DOM4-130-102 (SEQ ID NO:315), DOM4-130-103 (SEQ ID NO:316), DOM4-130-104 (SEQ ID NO:317), DOM4-130-105 (SEQ ID NO:318), DOM4-130-106 (SEQ ID NO:319), DOM4-130-107 (SEQ ID NO:320), DOM4-130-108 (SEQ ID NO:321), DOM4-130-109 (SEQ ID NO:322), DOM4-130-110 (SEQ ID NO:323), DOM4-130-111 (SEQ ID NO:324), DOM4-130-112 (SEQ ID NO:325), DOM4-130-113 (SEQ ID NO:326), DOM4-130-114 (SEQ ID NO:327), DOM4-130-115 (SEQ ID NO:328), DOM4-130-116 (SEQ ID NO:329), DOM4-130-117 (SEQ ID NO:330), DOM4-130-118 (SEQ ID NO:331), DOM4-130-119 (SEQ ID NO:332), DOM4-130-120 (SEQ ID NO:333), DOM4-130-121 (SEQ ID NO:334), DOM4-130-122 (SEQ ID NO:335), DOM4-130-123 (SEQ ID NO:336), DOM4-130-124 (SEQ ID NO:337), DOM4-130-125 (SEQ ID NO:338), DOM4-130-126 (SEQ ID NO:339), DOM4-130-127 (SEQ ID NO:340), DOM4-130-128 (SEQ ID NO:341), DOM4-130-129 (SEQ ID NO:342), DOM4-130-130 (SEQ ID NO:343), DOM4-130-131 (SEQ ID NO:344), DOM4-130-132 (SEQ ID NO:345), DOM4-130-133 (SEQ ID NO:346), DOM4-131 (SEQ ID NO:347), DOM4-132 (SEQ ID NO:348), and DOM4-133 (SEQ ID NO:349).

95. The method of claim 92, wherein said respiratory disease is selected from the group consisting of lung inflammation, chronic obstructive pulmonary disease, asthma, pneumonia, hypersensitivity pneumonitis, pulmonary infiltrate with eosinophilia, environmental lung disease, pneumonia, bronchiectasis, cystic fibrosis, interstitial lung disease, primary pulmonary hypertension, pulmonary thromboembolism, disorders of the pleura, disorders of the mediastinum, disorders of the diaphragm, hypoventilation, hyperventilation, sleep apnea, acute respiratory distress syndrome, mesothelioma, sarcoma, graft rejection, graft versus host disease, lung cancer, allergic rhinitis, allergy, asbestosis, aspergilloma, aspergillosis, bronchiectasis, chronic bronchitis, emphysema, eosinophilic pneumonia, idiopathic pulmonary fibrosis, invasive pneumococcal disease, influenza, nontuberculous mycobacteria, pleural effusion, pneumoconiosis, pneumocytosis, pneumonia, pulmonary actinomycosis, pulmonary alveolar proteinosis, pulmonary anthrax, pulmonary edema, pulmonary embolus, pulmonary inflammation, pulmonary histiocytosis X, pulmonary hypertension, pulmonary nocardiosis, pulmonary tuberculosis, pulmonary veno-occlusive disease, rheumatoid lung disease, sarcoidosis, and Wegener's granulomatosis.
